(19) United States
(12) Patent Application Publication
(10) Pub. No.: US 2016/0195533 A1
(43) Pub. Date: Jul. 7, 2016

(54) METHOD FOR SCREENING EMT INHIBITOR

(71) Applicant: Medicinal Bioconvergence Research Center, Suwon-si (KR)

(72) Inventors: Byung-Gyu KIM, Daegu (KR); Ji-Ae Song, Suwon-si (KR); Sunghoon Kim, Seoul (KR)

(21) Appl. No.: 14/670,390

(22) Filed: Mar. 26, 2015

(30) Foreign Application Priority Data
Jan. 2, 2015 (KR) 10-2015-0000234

(51) Int. Cl. G01N 33/573

(52) U.S. Cl. CPC G01N 33/573; G01N 2500/02; G01N 2333/9015

(57) ABSTRACT

A method for screening an EMT inhibitor including: contacting EPRS, Snail1 protein, and a test agent; and measuring a change in a binding level between the EPRS and the Snail1 protein.

### CROSS-REFERENCE TO RELATED APPLICATION

[0001] This application claims priority from and the benefit of Korean Patent Application No. 10-2015-0000234, filed on Jan. 2, 2015, which is hereby incorporated by reference for all purposes as if fully set forth herein.

### BACKGROUND

[0002] 1. Field

[0003] Exemplary embodiments relate to a method for screening an epithelial-mesenchymal transition (EMT) inhibitor.

[0004] 2. Discussion of the Background

[0005] Epithelial-mesenchymal transition (EMT), which occurs during a normal embryonic development procedure, is a process by which epithelial cells lose their epithelial cell phenotype and obtain the mesenchymal cell phenotype with high mobility. However, it has been known that irreversible EMT does not only cause heart, liver, kidney, and vascular malfunctions, but is also involved in the transition to malignancy. When EMT occurs, epithelial cells lose their apical-basal polarity, change their shape from a square type to a fibroblast type, have a reduced number of epithelial cell markers, and an increased number of mesenchymal cell markers. It has been recently known that EMT plays various roles in the regeneration and fibrosis of tissue and the development and transition of cancer as well as embryonic histogenesis and differentiation.

[0006] Snail is currently known to be involved in the EMT procedure by inhibiting E-cadherin, which is an invasion inhibitor, in the process of cancer metastasis, and is known to be also associated with prenatal mesoderm and neutral tube formation. Experimental results known today proved that Snail is involved in melanoma, bladder cancer, rectal cancer, pancreatic cancer, and the like (see Cano, A. et al. Nat Cell Biol 2, 76-83 (2000); Batlle, E. et al. Nat Cell Biol 2, 84-9 (2000); Poser, I. et al. J Biol Chem 276, 24661-6 (2001); and De Craene, B. et al. Cancer Res 65, 6237-44 (2005)). It is known that significant reduction in the expression level of E-cadherin in such cancers was associated with the overexpression of the Snail protein. The expression of the Snail protein is regulated in TGF and Wnt signaling pathways on the transcription level.

[0007] TGF-β is one of the main growth factors in wound healing (summarized in O'Kane (1997) Int J Biochem Cell Biol 29:79-89). During granulation, TGF-β comes from platelets in the wounded area. Here, TGF-β regulates its generation in macrophages, and induces secretion of other growth factors by, for example, monocytes. The important functions thereof during wound healing include promotion of chemotaxis of inflammatory cells, synthesis of extracellular matrix, and regulation of gene expression, proliferation, and differentiation of cell types, which are involved in the wounding healing process. Under pathological conditions, these TGF-β-mediated effects, especially, the regulation of the extracellular matrix (ECM) generation may cause fibrosis or intradermal wounding (Border (1994) N Engl J Med 331:1286-1292).

[0008] It has been reported that TGF-β promotes renal cell hypertrophy and pathogenic accumulation of the extracellular matrix in fibrotic disease, diabetic nephropathy, and glomerulonephritis. The interruption of the TGF-β signaling pathway through treatment using an anti-TGF-β antibody prevents mesangial matrix expansion and gradual reduction of renal function, and reduces established lesions of diabetic glomerular disease in animals (see Border (1990) 346: 371-374; Yu (2004) Kindney Int 66: 1774-1784; Fukasawah (2004) Kindney Int 65: 63-74; and Sharma (1996) Diabetes 45: 522-530). TGF-β also plays an important role in liver fibrosis. The activation, essential for the development of liver fibrosis, of the hepatic stellate cells to give myofibroblasts, the main producer of the extracellular matrix in the course of the development of liver cirrhosis, is stimulated by TGF-β. It has likewise been shown here that interruption of the TGF-β signaling pathway reduces fibrosis in experimental models (see Yata (2002) Hepatology 35:1022-1030; and Arias (2003) BMC Gastroenterol 3:29).

[0009] TGF-β also takes on a key function in the formation of cancer (summarized in Derynck (2001) Nature Genetics: 29: 117-129; and Elliott (2005) J Clin Onc 23: 2078-2093). In early stages of the development of cancer, TGF-β counters the formation of cancer. This tumor-suppressive activity is based principally on the ability of TGF-β to inhibit the division of epithelial cells. By contrast, TGF-β promotes cancer growth and the formation of metastases in later tumor stages. This may result from the fact that most epithelial tumors develop resistance to the growth-inhibiting action of TGF-β, and TGF-β simultaneously supports the growth of cancer cells through other mechanisms. These mechanisms include the promotion of angiogenesis, immunosuppressive action, which supports tumor cells in avoiding the control function of the immune system (immune-surveillance), and promotion of invasiveness and the formation of metastases. The formation of the invasive phenotype of tumor cells is a principal prerequisite for the formation of metastases. TGF-β promotes this process through its ability to regulate cellular adhesion, motility, and the formation of the extracellular matrix. Furthermore, TGF-β induces the transition from the cell epithelial phenotype to the invasive mesenchymal phenotype (epithelial mesenchymal transition=EMT). The important role played by TGF-β in the promotion of cancer growth is also demonstrated by investigations which show a correlation between strong TGF-β expression and a poor prognosis. The increased TGF-β level has been found, inter alia, in patients with prostate, breast, intestinal, and lung cancer (see Wikstroem (1998) Prostate 37: 19-29; Hasegawa (2001) Cancer 91: 964-971; and Friedman (1995), Cancer Epidemiol Biomarkers Prev. 4:549-54).

[0010] Aminoacyl-tRNA synthetase is an enzyme that accurately binds a specific amino acid to its corresponding tRNA, and is essential in the protein synthesis system. The procedure of binding amino acid and tRNA is largely divided into two steps: a first step of activating the amino acid into aminoacyl adenylate by consuming one ATP; and a second step of transferring the activated tRNA. A mammalian aminoacyl tRNA synthetase has a role similar to that of a prokaryotic aminoacyl tRNA synthetase, but has a different additional domain. This additional domain is involved in the formation of various complexes with aminoacyl tRNA synthetase or other regulatory factors. It has recently been discovered that this structural complexity is associated with functional variety of the aminoacyl tRNA synthetase and several human diseases.

[0011] The above information disclosed in this Background section is only for enhancement of understanding of the background of the inventive concept, and, therefore, it may contain information that does not form the prior art that is already known in this country to a person of ordinary skill in the art.

### SUMMARY

[0012] One or more exemplary embodiments relate to a method for screening an epithelial-mesenchymal transition (EMT) inhibitor.

[0013] Additional aspects will be set forth in the detailed description which follows, and, in part, will be apparent from the disclosure, or may be learned by practice of the inventive concept.

[0014] One or more exemplary embodiments provide a method for screening an EMT inhibitor, the method including: (a) contacting glutamyl-prolyl-tRNA synthetase (EPRS) and Snail1 protein with a test agent; and (b) measuring a change in a binding level between the EPRS and the Snail1 protein. The amino acid sequence may be selected from the group consisting of SEQ ID NOs: 2 to 6.

[0015] One or more exemplary embodiments provide a method for screening an epithelial-mesenchymal transition (EMT) inhibitor, the method including: (a) contacting glutamyl-prolyl-tRNA synthetase (EPRS) having an amino acid sequence, Snail1 protein, and a test agent, the amino acid sequence being selected from the group consisting of SEQ ID NOS: 2 to 6; and (b) measuring a change in a binding level between the EPRS and the Snail1 protein.

[0016] One or more exemplary embodiments relate to a novel use of EPRS, and provide a method for screening an EMT inhibitor. The teachings of this disclosure may be useful to develop novel therapeutic agents against various EMT-related diseases, including canner.

[0017] The foregoing general description and the following detailed description are exemplary and explanatory and are intended to provide further explanation of the claimed subject matter.

### BRIEF DESCRIPTION OF THE DRAWINGS

[0018] The accompanying drawings, which are included to provide a further understanding of the inventive concept, and are incorporated in and constitute a part of this specification, illustrate exemplary embodiments of the inventive concept, and, together with the description, serve to explain principles of the inventive concept.

[0019] In all drawings herein, the sign + expresses the presence of a corresponding material (i.e., expression by transfection and material treatment condition), and the sign − expresses the absence of the corresponding material.

[0020] FIG. 1 shows western blot analysis results, after A549 cells were treated with TGF-β1 dose-dependently, and then nucleus and cytosol fractions were subjected to endogenous immunoprecipitation (IP) using protein A-agarose beads and anti-EPRS antibody), according to one or more exemplary embodiments of the inventive concept. (WB/SNAIL: western blotting with anti-Snail 1 antibody, WB/EPRS: western blotting with anti-EPRS antibody, Cyto: cytosol fraction, Nuc: nucleus fraction).

[0021] FIG. 2 shows immunoblot assay of EPRS and Snail1), according to one or more exemplary embodiments of the inventive concept. HEK293T cells transiently co-transfected with Flag-tagged EPRS and Strep-tagged Snail1. EPRS was imunoprecipitated with anti-Flag M2 affinity gel and immunoblotted with anti-Strep-HRP and anti-Flag-HRP antibody.

[0022] FIG. 3 shows immunoblot assay of EPRS and so on. HEK293T cells transiently transfected with Strep-tagged Snail1), according to one or more exemplary embodiments of the inventive concept. Snail1 was imunoprecipitated with MagStrep 2HC and immunoblotted with anti-EPRS, anti-HDAC1, anti-L13a, anti-RRS, anti-Strep-HRP antibody. (STREP-EV: experimental group using HEK293T cell transfected with Strep-tagged empty vector, WCL: whole cell lysate).

[0023] FIG. 4 shows western blot analysis results, according to one or more exemplary embodiments of the inventive concept. In HEK293T cells in which Strep-tagged ERS-WHEP (indicated by E), Strep-tagged WHEP-PRS (indicated by P), or 2× Strep-tagged EPRS (indicated by EP) was expressed together with Flag-tagged Snail 1, immunoprecipitation (IP) using MagStrep 2HC was performed and western blotting was performed using anti-Flag-HRP antibody and anti-strep-HRP antibody (WCL: whole cell lysate).

[0024] FIG. 5A shows immunoblotting results, according to one or more exemplary embodiments of the inventive concept. Flag-tagged empty vector or Flag-tagged EPRS was expressed in A549 cells, which were then treated with or without TGF-β1, and then the cell lysate for each experimental group was immunoblotted with anti-Snail1 antibody, anti-SMAD2 antibody, anti-SMAD3 antibody, anti-FLAG-HRP antibody, and anti-β-actin antibody.

[0025] FIG. 5B shows immunoblotting results, according to one or more exemplary embodiments of the inventive concept. 2× strep-tagged empty vector or 2× strep-tagged EPRS was expressed in HCC44 cells, which were then treated with or without TGF-β1, and then the cell lysate for each experimental group was immunoblotted with anti-Snail 1 antibody and anti-strep-HRP antibody.

[0026] FIG. 5C shows immunoblotting results, according to one or more exemplary embodiments of the inventive concept. 2× strep-tagged empty vector or 2× strep-tagged EPRS was expressed in HEK293T cells, which were then treated with or without TGF-β1, and then the cell lysate for each experimental group was immunoblotted with anti-Snail 1 antibody and anti-strep-HRP antibody.

[0027] FIG. 5D shows immunoblotting results, according to one or more exemplary embodiments of the inventive concept. 2× strep-tagged empty vector or 2× strep-tagged EPRS was expressed at different expression levels in H1299 cells, and then the cell lysate for each experimental group was immunoblotted with anti-Snail 1 antibody and anti-strep-HRP antibody (MOCK: empty vector, [symbol] : the expression level of a corresponding protein increases in cells)

[0028] FIG. 6 shows results when A549 cells transiently transfected for overexpression of 2×Strep-tagged EPRS were treated with or without TGF-β1, and then subjected to qRT-PCR assay to monitor the mRA expression level of Snail (A) and EPRS (B), according to one or more exemplary embodiments of the inventive concept. (MocK: experimental group using A549 cells transfected with 2×Strep-tagged empty vector plasmid DNA, EPRS: experimental group using A549 cells transfected with 2×Strep-tagged EPRS plasmid DNA, Cont: TGF-β1 non-treated group, TGFβ1: TGF-β1 treated group).

[0029] FIG. 7 shows immunoblotting results, according to one or more exemplary embodiments of the inventive concept. Each of Strep-tagged ERS, Strep-tagged PRS, and Strep-tagged EPRS, and Flag-tagged Snail 1 were alone or together in HEK293T cells, and then the cell lysates in the MG 132 treated group and MG 132 untreated group were immunoblotted with anti-Flag-HRP antibody (EV: STREP-tag empty vector and FLAG-tag empty vector expression).

[0030] FIG. 8. Shows the effect of EPRS on ubiqutination of Snail1, according to one or more exemplary embodiments of the inventive concept. HA-tagged ubiquitin was co-transfected with Strep-Snail and Flag-Mock or Flag-EPRS in the presence of 50 μM MG132 for 4 h before harvest. The cell lysates were immunoprecipitated with streptavidin agarose (GE healthcare lifesciences). The beads were washed three times with the cold washing buffer, the precipitates were dissolved in the 2×SDS sample buffer and subjected to SDS-PAGE. Subsequently, Western blot analysis was performed with anti-HA antibody. (WCL: whole cell lysate).

[0031] FIG. 9A shows immunoblotting results, according to one or more exemplary embodiments of the inventive concept. EPRS-knocked-down A549 cells were treated with or without TGF-β1 for 1 hour, and the cell lysates were fractionated into nucleus and cytoplasmic protein. Then, EMT marker proteins of Snail 1, p-SMAD3, SMAD2/3, SLUG, and EPRS were immunoblotted (si-con: non-silencing control siRNA introduced group; si-EPRS: human EPRS gene-specific siRNA introduced knockdown group; HSP90α/β and p84 were used as loading controls for confirming the protein expression levels in cytoplasm and nucleus).

[0032] FIG. 9B shows immunoblotting results, according to one or more exemplary embodiments of the inventive concept. EPRS-knocked-down A549 cells were treated with or without TGF-β1 for 48 hours, and the cell lysate was fractionated into the nucleus and cytoplasmic protein. Then, EMT marker proteins of E-cadherin, N-cadherin, and EPRS were immunoblotted (si-con: non-silencing control siRNA introduced group; si-EPRS: human EPRS gene-specific siRNA introduced knockdown group; HSP90α/β and p84 were used as loading controls for confirming the protein expression amounts in cytoplasm and nucleus).

[0033] FIG. 10 shows microscope magnified images of cell migration assay results in groups of EPRS-knocked-down A549 cells treated with or without TGF-β1, according to one or more exemplary embodiments of the inventive concept. (si-con: non-silencing control siRNA introduced group; si-EPRS: human EPRS-specific siRNA introduced knockdown group).

[0034] FIG. 11 shows quantifications of cell migration assay results in groups of EPRS-knocked-down A549 cells treated with or without TGF-β1, according to one or more exemplary embodiments of the inventive concept. (si-con: non-silencing control siRNA introduced group; si-EPRS: human EPRS-specific siRNA introduced knockdown group).

[0035] FIG. 12 shows microscope magnified images of cell invasion assay results in groups of EPRS-knocked-down A549 cells treated with or without TGF-β1, according to one or more exemplary embodiments of the inventive concept. (si-con: non-silencing control siRNA introduced group; si-EPRS: human EPRS-specific siRNA introduced knockdown group).

[0036] FIG. 13 shows quantifications of cell invasion assay results in groups of EPRS-knocked-down A549 cells treated with or without TGF-β1, according to one or more exemplary embodiments of the inventive concept. (si-con: non-silencing control siRNA introduced group; si-EPRS: human EPRS-specific siRNA introduced knockdown group).

[0037] FIG. 14 is a diagram showing domains constituting each of polypeptides represented by SEQ ID NOS: 1 to 7, according to one or more exemplary embodiments of the inventive concept. (for each, “EPRS (WT)” corresponds SEQ ID NO: 1, “EPRS(ΔPRS)” corresponds SEQ ID NO: 2, “EPRS(ΔWHEP, PRS)” corresponds SEQ ID NO: 3, “EPRS(ΔERS)” corresponds SEQ ID NO: 4, “EPRS(ΔERS, WHEP)” corresponds SEQ ID NO: 5, “EPRS(ΔWHEP)” corresponds SEQ ID NO: 6, and “EPRS(ΔERS, PRS)” corresponds SEQ ID NO: 7).

### DETAILED DESCRIPTION OF THE ILLUSTRATED EMBODIMENTS

[0038] In the following description, for the purposes of explanation, numerous specific details are set forth in order to provide a thorough understanding of various exemplary embodiments. It is apparent, however, that various exemplary embodiments may be practiced without these specific details or with one or more equivalent arrangements. In other instances, well-known structures and devices are shown in block diagram form in order to avoid unnecessarily obscuring various exemplary embodiments.

[0039] In the accompanying figures, the size and relative sizes of layers, films, panels, regions, etc., may be exaggerated for clarity and descriptive purposes. Also, like reference numerals denote like elements.

[0040] The terminology used herein is for the purpose of describing particular embodiments and is not intended to be limiting. As used herein, the singular forms, “a,” “an,” and “the” are intended to include the plural forms as well, unless the context clearly indicates otherwise. Moreover, the terms “comprises,” comprising,” “includes,” and/or “including,” when used in this specification, specify the presence of stated features, integers, steps, operations, elements, components, and/or groups thereof, but do not preclude the presence or addition of one or more other features, integers, steps, operations, elements, components, and/or groups thereof.

[0041] The present inventors, while searching for methods and materials for effectively treating various epithelial-mesenchymal transition (EMT)-related diseases, such as cancer and fibrosis, have found a novel function of EPRS that EMT is activated by the physical interaction between EPRS and Snail1, and verified that the inhibition of the binding of EPRS and Snail1 suppresses EMT. One or more exemplary embodiments described herein are based upon the research and discovery noted above.

[0042] Therefore, exemplary embodiments will be provided in view of the above-mentioned problems, and one or more exemplary embodiments provide a method for screening an epithelial-mesenchymal transition (EMT) inhibitor, the method including: (a) contacting full-length glutamyl-prolyl-tRNA synthetase (EPRS) or its fragment having the amino acid sequence selected from the group consisting of SEQ ID NOS: 2 to 6, Snail1 protein, and a test agent; and (b) measuring the change in the binding level between EPRS and Snail1.

[0043] Hereinafter, various examples and embodiments will be described in detail.

[0044] The present inventors discovered that EPRS interacts with Snail1 to regulate an EMT pathway, and the details of which will be also discussed.

### DEFINITIONS

[0045] Unless defined otherwise, all technical and scientific terms used herein have the same meaning as commonly understood by a person skilled in the art. The following reference documents provide one of skills having general definitions with many terms used herein: Singleton et al., DICTIONARY OF MICROBIOLOGY AND MOLECULAR BIOLOGY(2d ed. 1994); THE CAMBRIDGE DICTIONARY OF SCIENCE AND TECHNOLOGY (Walker ed., 1988); and Hale & Marham, THE HARPER COLLINS DICTIONARY OF BIOLOGY. Also, the following definitions are provided to help readers with the implementation of the inventive concept.

[0046] As used herein, the term “protein” is used interchangeably with the term “polypeptide” or “peptide”, and refers to a polymer of amino acid residues, as typically found in proteins in nature.

[0047] As used herein, the term “expression” refers to the formation of protein or nucleic acid in cells.

[0048] As used herein, the term “glutamyl-prolyl-tRNA synthetase (EPRS)” refers to a type of aminoacyl-tRNA synthetase that promotes the binding of glutamate and proline with tRNA. Among aminoacyl-tRNA synthetases, the enzyme (EPRS) that promotes the binding of glutamate and proline with tRNA in humans is uniquely present on one polypeptide chain. A glutamate-catalyzing domain and a proline-catalyzing domain are located in the N-terminal region and the C-terminal region, respectively, and the two domains are linked via the WHEP domain. The glutamyl tRNA synthetase pertains to class 1 aminoacyl tRNA synthetase, and the proline tRNA synthetase pertains to class 2 aminoacyl tRNA synthetase. The WHEP domain linking the two domains has a structure in which the chain of 57 amino acids is repeated three times, and mediates a protein-protein interaction or a protein-RNA interaction. As long as the full-length EPRS protein (or polypeptide) of exemplary embodiments is any known mammal-derived EPRS sequence, the kind thereof is not particularly limited, and for example, it may be a human EPRS protein represented by SEQ ID NO: 1. In addition, the EPRS of the protein may encompass its functional equivalents.

[0049] As used herein, the term “EPRS fragment” refers to a sequence of a fragment from the full-length EPRS polypeptide, and may be preferably any sequence that contains a glutamate binding domain (ERS domain) or/and a proline binding domain (PRS domain) without particular limitation, and include, for example, SEQ ID NO: 2 (ERS-WHEP domain, “EPRS (ΔPRS) in FIG. 14”, that is, extracted from the sequence of 1^{st} to 1024^{th} amino acids from the EPRS sequence represented by SEQ ID NO: 1), SEQ ID NO: 3 (ERS domain, “EPRS(ΔWHEP, PRS) in FIG. 14”, that is, extracted from the sequence of 1^{st} to 682^{nd} amino acids from the EPRS sequence represented by SEQ ID NO: 1), SEQ ID NO: 4 (WHEP-PRS domain, “EPRS(ΔERS) in FIG. 14”, that is, extracted from the sequence of 682^{nd} to 1512^{th} amino acids from the EPRS sequence represented by SEQ ID NO: 1), SEQ ID NO: 5 (PRS domain, “EPRS (ΔERS, WHEP) in FIG. 14”, that is, extracted from the sequence of 1024^{th} to 1512^{th} amino acids from the EPRS sequence represented by SEQ ID NO: 1), and SEQ ID NO: 6 (ERS-PRS domain, a linked body of SEQ ID NO: 3 and SEQ ID NO: 5). Herein, the EPRS fragment may be, most preferably, one that contains a proline binding domain, and may be, for example, any one polypeptide selected from the group consisting of SEQ ID NO: 4, SEQ ID NO: 5, and SEQ ID NO: 6, but is not limited thereto. Further, the EPRS fragment of exemplary embodiments may include its functional equivalents.

[0050] The term “functional equivalent” refers to a polypeptide having sequence homology (that is, identity) of at least 70%, preferably 80% or more, and more preferably 90% or more to the amino acid sequence of EPRS or its fragment. For example, the functional equivalent encompasses polypeptides having sequence homology of 70%, 71%, 72%, 73%, 74%, 75%, 76%, 77%, 78%, 79%, 80%, 81%, 82%, 83%, 84%, 85%, 86%, 87%, 88%, 89%, 90%, 91%, 92%, 93%, 94%, 95%, 96%, 97%, 98%, 99%, and 100%, and refers to a polypeptide exhibiting substantially identical physiological activity as the polypeptide represented by any one selected from the group consisting of SEQ ID NO: 1 to SEQ ID NO: 6. Herein, the term “substantially identical physiological activity” refers to the activity to provoke and promote the progress of the EMT pathway through binding with Snail, particularly, Snail1. The functional equivalent may result from the addition, substitution, or deletion of a part of the amino acid sequence of EPRS or its fragments. Herein, the substitution of amino acid is preferably a conservative substitution. Examples of the naturally occurring amino acid conservative substitution are as follows: aliphatic amino acids (Gly, Ala, Pro), hydrophobic amino acids (Ile, Leu, Val), aromatic amino acids (Phe, Tyr, Trp), acidic amino acids (Asp, Glu), basic amino acids (His, Lys, Arg, Gln, Asn), and sulfur-containing amino acids (Cys, Met). In addition, the functional equivalent encompasses variants in which some amino acids are deleted from the amino acid sequence of the EPRS polypeptide. The deletion or substitution of the amino acids is preferably located in a region which is not directly involved in physiological activity of the EPRS polypeptide. The functional equivalent also encompasses variants in which some amino acids are added to both terminals of the amino acid sequence of the EPRS polypeptide or into the amino acid sequence of the EPRS polypeptide. In addition, the functional equivalent also encompasses a polypeptide derivative in which a basic frame of the polypeptide according to one or more exemplary embodiments and physiological activity thereof are maintained, and the chemical structure of the polypeptide is modified. For example, the functional equivalent also encompasses the structural change for changing stability, storage ability, volatility, or solubility of the polypeptide of exemplary embodiments.

[0051] Herein, the sequence homology and identity are defined as the percentage of amino acid residues of a candidate sequence over the EPRS amino acid sequence after the amino acid sequence of the EPRS amino acid sequence (SEQ ID NO: 1) or its fragments (SEQ ID NO: 2 to SEQ ID NO: 6) and the candidate sequence are aligned and then gaps are introduced. If necessary, in order to obtain the sequence identity with the maximum percentage, the conservative substitution as a part of the sequence identity is not considered. In addition, none of N-terminal, C-terminal, or internal extensions, deletions, or insertions of the amino acid sequence of EPRS or its fragments shall be construed as affecting sequence identity or homology. In addition, the sequence homology may be determined by a general standard method used to compare similar parts of amino acid sequences of two polypeptides. A computer program, such as BLAST, aligns two polypeptides such that amino acids thereof are optimally matched (either along the full length of one or both sequences or along a predicted portion of one or both sequences). The program provides a default opening penalty and a default gap penalty, and provides a scoring matrix that can be used in connection with the computer program, for example, PAM250 (standard scoring matrix; Dayhoff et al., in Atlas of Protein Sequence and Structure, vol 5, supp 3, 1978). For example, the percent identity may be calculated as follows. The total number of identical matches multiplied by 100 and then divided by the sum of the length of the longer sequence within the matched span and the number of gaps introduced into the longer sequences in order to align the two sequences.

[0052] Herein, preferable functional equivalents of the EPRS encompass: NCBI Gene Bank Accession Number EAW93309.1 (SEQ ID NO: 25), CAI45949.1 (SEQ ID NO: 26), XP_001172425.1 (SEQ ID NO: 27), XP_003807230.1 (SEQ ID NO: 28), XP_009439782.1 (SEQ ID NO: 29), XP_003265132.1 (SEQ ID NO: 30), EAW93310.1 (SEQ ID NO: 31), and CAA38224.1 (SEQ ID NO: 32), which are 99% identical to the amino acid sequence of SEQ ID NO: 1; NCBI Gene Bank Accession Number XP_010366377.1 (SEQ ID NO: 33), XP_005540939.1 (SEQ ID NO: 34), XP_007986597.1 (SEQ ID NO: 35), XP_005540938.1 (SEQ ID NO: 36), XP_007986596.1 (SEQ ID NO: 37), XP_007986598.1 (SEQ ID NO: 38), which are 98% identical to the amino acid sequence of SEQ ID NO: 1; NCBI Gene Bank Accession Number XP_003930387.1 (SEQ ID NO: 39), XP_010339237.1 (SEQ ID NO: 40), EHHSO530.1 (SEQ ID NO: 41), which are 97% identical to the amino acid sequence of SEQ ID NO: 1; NCBI Gene Bank Accession Number XP_002808297.1 (SEQ ID NO: 42), XP_009185375.1 (SEQ ID NO: 43), EHH15538.1 (SEQ ID NO: 44), which are 96% identical to the amino acid sequence of SEQ ID NO: 1; NCBI Gene Bank Accession Number XP_004028474.1 (SEQ ID NO: 45), XP_008983438.1 (SEQ ID NO: 46), which are 95% identical to the amino acid sequence of SEQ ID NO: 1; NCBI Gene Bank Accession Number XP_008053500.1 (SEQ ID NO: 47), which are 94% identical to the amino acid sequence of SEQ ID NO: 1; NCBI Gene Bank Accession Number XP_001488980.1 (SEQ ID NO: 48), XP_008541056.1 (SEQ ID NO: 49), XP_849468.1 (SEQ ID NO: 50), XP_004013652.1 (SEQ ID NO: 51), XP_005640882.1 (SEQ ID NO: 52), XP_005981363.1 (SEQ ID NO: 53), XP_005690536.1 (SEQ ID NO: 54), XP_002920053.1 (SEQ ID NO: 55), XP_005981362.1 (SEQ ID NO: 56), XP_004271072.1 (SEQ ID NO: 57), XP_008053499.1 (SEQ ID NO: 58), XP_004415195.1 (SEQ ID NO: 59), XP_004324147.1 (SEQ ID NO: 60), EFB20321.1 (SEQ ID NO: 61), XP_004751515.1 (SEQ ID NO: 62), XP_008683957.1 (SEQ ID NO: 63), XP_003999559.1 (SEQ ID NO: 64), XP_007072912.1 (SEQ ID NO: 65), XP_008586040.1 (SEQ ID NO: 66), which are 93% identical to the amino acid sequence of SEQ ID NO: 1; NCBI Gene Bank Accession Number XP_006188215.1 (SEQ ID NO: 67), XP_006198933.1 (SEQ ID NO: 68), XP_004480290.1 (SEQ ID NO: 69), XP_008266633.1 (SEQ ID NO: 70), XP_006056008.1 (SEQ ID NO: 71), XP_007935118.1 (SEQ ID NO:72), XP_007455449.1 (SEQ ID NO: 73), NP_001230249.1 (SEQ ID NO: 74), XP_006056007.1 (SEQ ID NO: 75), XP_005905625.1 (SEQ ID NO: 76), XP_007129327.1 (SEQ ID NO: 77), XP_007172136.1 (SEQ ID NO: 78), XP_005335922.1 (SEQ ID NO: 79), XP_007172135.1 (SEQ ID NO: 80), which are 92% identical to the amino acid sequence of SEQ ID NO: 1; NCBI Gene Bank Accession Number XP_003419927.1 (SEQ ID NO: 81), XP_006869760.1 (SEQ ID NO: 82), XP_007521381.1 (SEQ ID NO: 83), XP_005335921.1 (SEQ ID NO: 84), XP_008148043.1 (SEQ ID NO: 85), XP_004439743.1 (SEQ ID NO: 86), XP_004685497.1 (SEQ ID NO: 87), XP_004578688.1 (SEQ ID NO: 88), XP_005879946.1 (SEQ ID NO: 89), which are 91% identical to the amino acid sequence of SEQ ID NO: 1; NCBI Gene Bank Accession Number XP_008825021.1 (SEQ ID NO: 90), XP_008825020.1 (SEQ ID NO: 91), XP_004699962.1 (SEQ ID NO: 92), XP_006140298.1 (SEQ ID NO: 93), XP_007642504.1 (SEQ ID NO: 94), ERE73005.1 (SEQ ID NO: 95), AAH94679.1 (SEQ ID NO: 96), EDL13067.1 (SEQ ID NO: 97), XP_008825022.1 (SEQ ID NO: 98), which are 90% identical to the amino acid sequence of SEQ ID NO: 1; NCBI Gene Bank Accession Number XP_005348894.1 (SEQ ID NO: 99), AAI41050.1 (SEQ ID NO: 100), NP_084011.1 (SEQ ID NO: 101), XP_006497180.1 (SEQ ID NO: 102), XP_005082493.1 (SEQ ID NO: 103), ERE73006.1 (SEQ ID NO: 104), XP_007636777.1 (SEQ ID NO: 105), which are 89% identical to the amino acid sequence of SEQ ID NO: 1; NCBI Gene Bank Accession Number XP_004670165.1 (SEQ ID NO: 106), XP_006916292.1 (SEQ ID NO: 107), XP_006250488.1 (SEQ ID NO: 108), XP_006250487.1 (SEQ ID NO: 109), XP_006094389.1 (SEQ ID NO: 110), which are 88% identical to the amino acid sequence of SEQ ID NO: 1; NCBI Gene Bank Accession Number XP_005409334.1 (SEQ ID NO: 111), XP_004626936.1 (SEQ ID NO: 112), XP_004613070.1 (SEQ ID NO: 113), KFO25396.1 (SEQ ID NO: 114), which are 87% identical to the amino acid sequence of SEQ ID NO: 1; NCBI Gene Bank Accession Number XP_003474570.1 (SEQ ID NO: 115), XP_005005650.1 (SEQ ID NO: 116), XP_004867452.1 (SEQ ID NO: 117), XP_004878984.1 (SEQ ID NO: 118), which are 86% identical to the amino acid sequence of SEQ ID NO: 1; NCBI Gene Bank Accession Number EPQ16188.1 (SEQ ID NO: 119), which is 85% identical to the amino acid sequence of SEQ ID NO: 1; NCBI Gene Bank Accession Number NP_001019409.1 (SEQ ID NO: 120), which is 84% identical to the amino acid sequence of SEQ ID NO: 1; and NCBI Gene Bank Accession Number XP_008177290.1 (SEQ ID NO: 121), XP_009094640.1 (SEQ ID NO: 122), XP_006022406.1 (SEQ ID NO: 123), which are 83% identical to the amino acid sequence of SEQ ID NO: 1, but not limited thereto.

[0053] The protein (polypeptide) according to one or more exemplary embodiments may be naturally extracted or may be constructed by a genetic engineering method. For example, a nucleic acid encoding the polypeptide or its functional equivalent (SEQ ID NO: 8 for EPRS, and any one selected from the group consisting of SEQ ID NOS: 9 to 13 for the EPRS fragment) is constructed by a normal method. The nucleic acid may be constructed by PCR amplification using appropriate primers. Alternatively, the DNA sequence may be synthesized by a standard method known in the art, for example, an automatic DNA synthesizer (marketed by Biosearch Co. or Applied Biosystems Co.) The constructed nucleic acid is inserted into a vector including at least one expression control sequence (e.g., promoter, enhancer, etc.), which is operatively linked to the nucleic acid to regulate the expression of the nucleic acid, and the resulting recombinant expression vector transfects host cells. The resultant transformants are cultured under media and conditions suitable for the expression of the nucleic acid, and a substantially pure polypeptide which is expressed by the nucleic acid is collected from the cultured product. The collection may be conducted using the method known in the art (e.g., chromatography). Herein, the term “substantially pure polypeptide” means that the polypeptide according to one or more exemplary embodiments does not substantially contain any other protein derived from host cells. The genetic engineering method for synthesizing the polypeptide of the present invention may refer to the following documents: Maniatis et al., Molecular Cloning; A laboratory Manual, Cold Spring Harbor laboratory, 1982; Sambrook et al., Molecular Cloning: A Laboratory Manual, Cold Spring Harbor Press, N.Y., Second (1998) and Third (2000) Editions; Gene Expression Technology, Method in Enzymology, Genetics and Molecular Biology, Method in Enzymology, Guthrie & Fink(eds.), Academic Press, San Diego, Calif., 1991; and Hitzeman et al., J. Biol. Chem., 255:12073-12080, 1990.

[0054] In addition, the polypeptide of one or more exemplary embodiments may be easily prepared by a chemical synthesis known in the art (Creighton, Proteins; Structures and Molecular Principles, W. H. Freeman and Co., NY, 1983). Representative examples thereof include, but are not limited to, liquid- or solid-phase synthesis, fragment condensation, F-MOC or T-BOC chemical synthesis (Chemical Approaches to the Synthesis of Peptides and Proteins, Williams et al., Eds., CRC Press, Boca Raton Fla., 1997; A Practical Approach, Athert on & Sheppard, Eds., IRL Press, Oxford, England, 1989).

[0055] As used herein, the term “promoter” refers to a DNA sequence that regulates expression of a nucleic acid sequence operatively linked thereto in the particular host cell, and the term “operably linked” means that one nucleic acid fragment binds to other nucleic acid fragments so that the function or expression of one is affected by the other. In addition, the promoter may further include any operator sequence for regulating transcription, a sequence coding an appropriate mRNA ribosome binding site, and a sequence regulating the termination of transcription and translation. The promoter may use a constitute promoter that ordinarily induces the expression of a target gene in all time zones, or an inducible promoter that induces the expression of a target gene at a particular location and time.

[0056] As used herein, the term “host cells” refers to prokaryotic or eukaryotic cells including heterologous DNA that is newly introduced into cells by any means (e.g., electric shock, calcium phosphatase precipitation, microinjection, transfection, viral infection, etc.)

[0057] As used herein, the term “nucleic acid”. “DNA sequence”, or “polynucleotide” refers to a single- or double-stranded deoxyribonucleotide or ribonucleotide. Unless otherwise limited, the term encompasses known analogs of natural nucleotides that hybridize to nucleic acids in a manner similar to naturally-occurring nucleotides.

[0058] As used herein, the term “polynucleotide encoding EPRS” may have a nucleotide sequence encoding an amino acid sequence represented by SEQ ID NO: 1 or an amino acid sequence having sequence homology of at least 70% to the foregoing amino acid sequence. The nucleic acid includes all DNA, cDNA, and RNA sequences. Specifically, the polynucleotide may have a nucleotide sequence encoding an amino acid sequence of SEQ ID NO: 1 or an amino acid sequence encoding having homology of at least 70% to the foregoing amino acid sequence, or may have a nucleotide sequence complementary to the foregoing nucleotide sequence. Preferably, the polynucleotide may have a nucleotide sequence represented by SEQ ID NO: 8. The nucleic acid may be isolated from nature, or may be constructed by the genetic engineering method described as above.

[0059] In addition, the polynucleotide sequence encoding the EPRS fragment may have a nucleotide sequence encoding an amino acid sequence selected from the group consisting of SEQ ID NOS: 2 to 6 or an amino acid sequence having sequence homology of at least 70% to the foregoing amino acid sequence. Preferably, the polynucleotide sequence may have any one nucleotide sequence selected from the group consisting of SEQ ID NOS: 9 to 13. The nucleic acid may be isolated from nature, or may be constructed by the genetic engineering method described as above.

[0060] As used herein, the term “homologues” when referring to proteins and/or protein sequences indicates that they are derived, naturally or artificially, from a common ancestral protein or protein sequence. Similarly, nucleic acids and/or nucleotide sequences are homologous when they are derived, naturally or artificially, from a common ancestral nucleic acid or nucleic acid sequence.

[0061] As used herein, the term “analog” refers to a molecule that is structurally similar to a reference molecule but has been modified in view of a target and a regulatory manner by replacing a specific substituent of the reference molecule with an alternate substituent. Compared to the reference molecule, the analog has similar or improved utility, which would be expected by a person skilled in the art. Synthesis and screening of analogs for identifying variants of known compounds having improved features (e.g., higher binding affinity to a target molecule) are well known in the pharmaceutical chemistry field.

[0062] As used herein, the term “contacting” has a general meaning, and refers to binding two or more agents (e.g., two polypeptides) or binding an agent and cells (e.g., protein and cells). Contacting may occur in vitro. For example, two or more agents are bound or a test agent and cells or a test agent and a cell lysate are bound in a test tube or another container. In addition, contacting may occur in cells or in situ. For example, recombinant polynucleotides encoding two polypeptides are co-expressed in cells, so that two polypeptides are contacted with each other in the cells or cell lysate.

[0063] As used herein, the term “agent” or “test agent” encompasses any substance, molecule, element, compound, entity, or a combination thereof. For example, the term encompasses, but is not limited to, protein, polypeptide, small organic molecule, polysaccharide, polynucleotide, and the like. Moreover, the term may be a natural product, a synthetic compound, a chemical compound, or a combination of two or more substances. Unless otherwise specified, the terms “agent”, “substance” and “compound” can be used interchangeably.

[0064] More specifically, the test agent that can be screened by the screening method of one or more exemplary embodiments includes polypeptides, β-turn mimetics, polysaccharides, phospholipids, hormones, prostaglandins, steroids, aromatic compounds, heterocyclic compounds, benzodiazepines, oligomeric N-substituted glycines, oligocarbamates, saccharides, fatty acids, purine, pyrimidine or derivatives, structural analogs, or a combinations thereof. A certain test agent may be a synthetic substance, and another test agent may be a natural substance. The test agent may be obtained from a wide variety of sources including synthetic or natural compound libraries. A combinatorial library may be produced from several kinds of compounds that can be synthesized in a step-by-step manner. Compounds of multiple combinatorial libraries may be prepared by the encoded synthetic libraries (ESL) method (WO 95/12608, WO 93/06121, WO 94/08051, WO 95/395503, and WO 95/30642). A peptide library may be generated by a phage display method (WO 91/18980). Libraries of natural compounds of bacteria, mold, plant, and animal extracts may be obtained from commercial sources or collected from fields. The known pharmacological agents may be applied to directed or random chemical modifications, such as acylation, alkylation, esterification, and amidification, in order to prepare structural analogs.

[0065] The test agent may be a naturally occurring protein or a fragment thereof. This test agent may be obtained from a natural source, for example, a cell or a tissue lysate. A library of polypeptide agents may also be obtained, for example, from a cDNA library, which is created by established routine methods or commercially available. The test agents may be peptides, such as peptides having about 5 to about 30 amino acids, preferably about 5 to about 20 amino acids, and more preferably from about 7 to about 15 amino acids. The peptides may represent the degraded products of naturally occurring proteins, random peptides, or “biased” random peptides.

[0066] Alternatively, the test agent may be a “nucleic acid”. The nucleic acid test agent may be a naturally occurring nucleic acid, random nucleic acid, or “biased” random nucleic acid. For example, the degraded products of prokaryotic or eukaryotic genomes can be used in a similar way as described above.

[0067] In addition, the test agents may be small molecules (e.g., molecules with a molecular weight of not more than about 1000). Preferably, high throughput assay may be applied for screening small molecule modulators. Many assays are useful for the screening (Shultz, Bioorg. Med. Chem. Lett., 8:2409-2414, 1998; Weller, Mol. Drivers., 3:61-70, 1997; Fernandes, Curr. Opin. Chem. Biol., 2:597-603, 1998; and Sittampalam, Curr. Opin. Chem. Biol., 1:384-91, 1997).

[0068] Libraries of test agents to be screened according to the method of one or more exemplary embodiments may be created on the basis of structural studies of Snail1 and EPRS, or fragments or analogs thereof. Such structural studies allow the identification of test agents that are more likely bind to Snail1 or EPRS. The three-dimensional structure of Snail1 or EPRS may be explored in a number of ways, such as crystal structure and molecular modeling. Protein structure studying methods using X-ray crystallography are well known in the document: Physical Bio-Chemistry, Van Holde, K. E. (Prentice-Hall, New Jersey 1971), pp. 221-239, and Physical Chemistry with Applications to the Life Sciences, D. Eisengerg & D. Crothers (Benjamin Cummings, Menlo Park 1979). Computer modeling for Snail1 or EPRS structures is provided as another means for designing test agents for screening. Molecular modeling methods are disclosed in the documents: U.S. Pat. No. 612,894, and U.S. Pat. No. 5,583,973. Further, protein structures may also be determined using neutron diffraction and nuclear magnetic resonance (NMR). Physical Chemistry, 4th Ed. Moore, W. J. (Prentice-Hall, New Jersey 1972) and NMR of Proteins and Nucleic Acids, K. Wuthrich (Wiley-Interscience, New York 1986).

[0069] One or more exemplary embodiments provide a method for screening an epithelial-mesenchymal transition (EMT) inhibitor.

[0070] The method includes (a) contacting full-length glutamyl-prolyl-tRNA synthetase (EPRS) or its fragment having the amino acid sequence selected from the group consisting of SEQ ID NOS: 2 to 6, Snail1 protein, and a test agent; and (b) measuring the change in the binding level between EPRS and Snail1.

[0071] As used herein, the term “Snail1” encompasses human Snail1 protein or homologous Snail1 protein of non-human origin (preferably mammalian origin) having equivalent functions to the human Snail1 protein. For example, the term may be the human Snail1 protein represented by SEQ ID NO: 15, but is not limited thereto. Further, in one or more exemplary embodiments, the Snail1 encompasses its functional equivalents.

[0072] The polynucleotide encoding Snail1 may have a nucleotide sequence encoding an amino acid sequence represented by SEQ ID NO: 15 or an amino acid sequence having sequence homology of at least 70% to the foregoing amino acid sequence. Preferably, it may have a nucleotide sequence represented by SEQ ID NO: 16. The nucleic acid may be isolated from the nature, or may be constructed by the genetic engineering method described as above.

[0073] The functional equivalent of Snail1 refers to a polypeptide having sequence homology (that is, identity) of at least 70%, preferably 80% or more, and more preferably 90% or more to the amino acid sequence of Snail1. Herein, specific functional equivalents of Snail1 encompass: NCBI Gene Bank Accession Number AAD17332.1 (SEQ ID NO: 124), BAG36039.1 (SEQ ID NO: 125), XP_004062397.1 (SEQ ID NO: 126), AAF32527.1 (SEQ ID NO: 127), which have 99% sequence identity to the Snail1 amino acid sequence of SEQ ID NO: 1; NCBI Gene Bank Accession Number XP_003809303.1 (SEQ ID NO: 128), XP_003252972.1 (SEQ ID NO: 129), XP_010382148.1 (SEQ ID NO: 130), XP_001097698.1 (SEQ ID NO: 131), XP_002830458.1 (SEQ ID NO: 132), XP_009435687.1 (SEQ ID NO: 133), which have 98% sequence identity to the Snail1 amino acid sequence of SEQ ID NO: 1; NCBI Gene Bank Accession Number XP_003932616.1 (SEQ ID NO: 134), which has 97% sequence identity to the Snail1 amino acid sequence of SEQ ID NO: 1; NCBI Gene Bank Accession Number XP_003787739.1 (SEQ ID NO: 135), which have 95% sequence identity to the Snail1 amino acid sequence of SEQ ID NO: 1; NCBI Gene Bank Accession Number XP_008060134.1 (SEQ ID NO: 136), which has 93% sequence identity to the Snail1 amino acid sequence of SEQ ID NO: 1; NCBI Gene Bank Accession Number XP_008570069.1 (SEQ ID NO: 137), XP_004883645.1 (SEQ ID NO: 138), XP_003732892.1 (SEQ ID NO: 139), which have 92% sequence identity to the Snail1 amino acid sequence of SEQ ID NO: 1; NCBI Gene Bank Accession Number KF035879.1 (SEQ ID NO: 140), which has 91% sequence identity to the Snail1 amino acid sequence of SEQ ID NO: 1; NCBI Gene Bank Accession Number XP_003467769.1 (SEQ ID NO: 141), XP_006141336.1 (SEQ ID NO: 142), XP_005325275.1 (SEQ ID NO: 143), ELW71708.1 (SEQ ID NO: 144), EFB26680.1 (SEQ ID NO: 145), XP_008696422.1 (SEQ ID NO: 146), which have 90% sequence identity to the Snail1 amino acid sequence of SEQ ID NO: 1; NCBI Gene Bank Accession Number NP_446257.1 (SEQ ID NO: 147), XP_005392380.1 (SEQ ID NO: 148), XP_008833387.1 (SEQ ID NO: 149), XP_005362911.1 (SEQ ID NO: 150), XP_006992689.1 (SEQ ID NO: 151), XP_005688790.1 (SEQ ID NO: 152), XP_005635224.1 (SEQ ID NO: 153), XP_008532217.1 (SEQ ID NO: 154), which have 89% sequence identity to the Snail1 amino acid sequence of SEQ ID NO: 1; NCBI Gene Bank Accession Number XP_002913027.1 (SEQ ID NO: 155), XP_004687529.1 (SEQ ID NO: 156), XP_004412574.1 (SEQ ID NO: 157), XP_007185370.1 (SEQ ID NO: 158), XP_007446447.1 (SEQ ID NO: 159), XP_007128099.1 (SEQ ID NO: 160), XP_004282941.1 (SEQ ID NO: 161), NP_035557.1 (SEQ ID NO: 162), XP_004746271.1 (SEQ ID NO: 163), XP_006206723.1 (SEQ ID NO: 164), XP_006175044.1 (SEQ ID NO: 165), NP_001106179.1 (SEQ ID NO: 166), XP_004430338.1 (SEQ ID NO: 167), XP_005074485.1 (SEQ ID NO: 168), XP_007608553.1 (SEQ ID NO: 169), which have 88% sequence identity to the Snail1 amino acid sequence of SEQ ID NO: 1; NCBI Gene Bank Accession Number XP_005983433.1 (SEQ ID NO: 170), CAA47675.1 (SEQ ID NO: 171), XP_003983440.1 (SEQ ID NO: 172), XP_001501267.2 (SEQ ID NO: 173), XP_003502520.1 (SEQ ID NO: 174), XP_004014930.1 (SEQ ID NO: 175), which have 87% sequence identity to the Snail1 amino acid sequence of SEQ ID NO: 1; NCBI Gene Bank Accession Number XP_004663926.1 (SEQ ID NO: 176), XP_006758858.1 (SEQ ID NO: 177), XP_006098041.1 (SEQ ID NO: 178), XP_007936620.1 (SEQ ID NO: 179), XP_004462255.1 (SEQ ID NO: 180), XP_008139391.1 (SEQ ID NO: 181), XP_004636165.1 (SEQ ID NO: 182), XP_006921969.1 (SEQ ID NO: 183), XP_004370603.1 (SEQ ID NO: 184), XP_004618816.1 (SEQ ID NO: 185), XP_004325726.1 (SEQ ID NO: 186), which have 86% sequence identity to the Snail1 amino acid sequence of SEQ ID NO: 1; NCBI Gene Bank Accession Number XP_007533425.1 (SEQ ID NO: 187), XP_003419974.1 (SEQ ID NO: 188), XP_005574198.1 (SEQ ID NO: 189), AAQ21376.1 (SEQ ID NO: 190), XP_007641286.1 (SEQ ID NO: 191), which have 85% sequence identity to the Snail1 amino acid sequence of SEQ ID NO: 1; NCBI Gene Bank Accession Number XP_005866258.1 (SEQ ID NO: 192), XP_006839389.1 (SEQ ID NO: 193), XP_004698375.1 (SEQ ID NO: 194), XP_006881815.1 (SEQ ID NO: 195), EHH21632.1 (SEQ ID NO: 196), which have 84% sequence identity to the Snail1 amino acid sequence of SEQ ID NO: 1; NCBI Gene Bank Accession Number XP_005860983.1 (SEQ ID NO: 197), which has 83% sequence identity to the Snail1 amino acid sequence of SEQ ID NO: 1; NCBI Gene Bank Accession Number XP_005658936.1 (SEQ ID NO: 198), which has 81% sequence identity to the Snail1 amino acid sequence of SEQ ID NO: 1; NCBI Gene Bank Accession Number XP_006099783.1 (SEQ ID NO: 199), EAW70471.1 (SEQ ID NO: 200), XP_004585952.1 (SEQ ID NO: 201), which have 79% sequence identity to the Snail1 amino acid sequence of SEQ ID NO: 1; NCBI Gene Bank Accession Number XP_004033198.1 (SEQ ID NO: 202), which has 78% sequence identity to the Snail1 amino acid sequence of SEQ ID NO: 1; and NCBI Gene Bank Accession Number XP_004451686.1 (SEQ ID NO: 203), which have 77% sequence identity to the Snail1 amino acid sequence of SEQ ID NO: 1, but are not limited thereto.

[0074] As used herein, the term “epithelial-mesenchymal transition (EMT)” means transition of epithelial cells into mesenchymal cells and diseases associated therewith. It was found that EMT is relevant with many diseases, such as tissue fibrosis and cancer development. For example, it has been known that cells, especially, cancer cells obtain mobility through EMT as an initial procedure, and penetrate into surrounding tissue. This suggests that the suppression of the EMT process allows the prevention and treatment of many EMT-related diseases, such as tissue fibrosis and cancers, in the initial stage.

[0075] As used herein, the term “EMT inhibitor” refers to an agent for preventing and/or treating known EMT-inducible diseases or symptoms, and more specifically, may be an agent for preventing or treating diseases or symptoms selected from the group consisting of, specifically, cancer metastasis, fibrotic disease, angiogenesis, diabetic renal nephropathy, allograft dysfunction, cataracts, and defects in cardiac valve formation, but is not limited thereto.

[0076] Specifically, the cancer in the “cancer metastasis” may be selected from the group consisting of, for example, non-small cell lung cancer, small cell lung cancer, melanoma, leukemia, colon cancer, liver cancer, gastric cancer, esophageal cancer, pancreatic cancer, gallbladder cancer, kidney cancer, bladder cancer, prostate cancer, testicular cancer, cervical cancer, endometrial cancer, choriocarcinoma, ovarian cancer, breast cancer, thyroid cancer, brain cancer, head and neck cancer, skin cancer, lymphoma, aplastic anemia, bile duct cancer, oral cancer, peritoneal cancer, small intestine cancer, and eye tumor, but is not limited thereto.

[0077] In addition, the fibrosis may be selected from the group consisting of, for example, renal fibrosis, hepatic fibrosis, pulmonary fibrosis, skin fibrosis, cardiac fibrosis, joint fibrosis, nerve fibrosis, muscular fibrosis, and peritoneal fibrosis, but is not limited thereto.

[0078] The EMT inhibitor of one or more exemplary embodiments may be an agent for preventing or treating, preferably, cancer (especially, cancer metastasis), and may be an agent for preventing or treating, most preferably, non-small cell lung cancer (especially, metastasis of non-small cell lung cancer).

[0079] The term “binding” may be a direct or indirect binding of Snail1 protein and full-length EPRS or its fragment having any one amino acid sequence selected from the group consisting of SEQ ID NOS: 2 to 6. The indirect binding means that the binding between two proteins forms a complex via another factor or together with the factor.

[0080] Herein, the change in the binding level between EPRS and Snail1 may be preferably a reduction in the binding level.

[0081] The reduction in the binding level means removal, prevention, or suppression of the binding between EPRS and Snail1. Specifically, the reduction in the binding level may be performed by allowing a test agent to remove, prevent the generation of, or suppress the generation of EPRS or Snail1 to change the expression level of EPRS or Snail1, or may be conducted by a method by which a test agent competitively or non-competitively binds to EPRS or Snail1 to change the level of interaction (binding) between the two proteins, or a method by which the interaction (binding) between EPRS and Snail1 of the EPRS-Snail1 protein complex that has been previously formed in cells is removed by a test agent. The term “competitively bind” means that a test agent binds to a site at which EPRS and Snail1 interact with (bind to) each other to remove, prevent, or suppress the interaction between EPRS and Snail1, and the term “non-competitively bind” means that a test agent binds to one other than the site at which EPRS and Snail1 interact with (bind to) each other, to remove, prevent, or suppress the interaction between EPRS and Snail1. According to one or more exemplary embodiments, it screens a test agent which inhibits expression and inherent functions of EPRS or Snail1 and suppresses or reduces the intercellular interaction (binding) level between Snail1 and EPRS (in an independent manner) within the extent that it does not cause a side effect and inhibits.

[0082] Preferably, the reduction in the binding level of one or more exemplary embodiments may be preferably attained by a method by which a test agent comparatively or non-comparatively binds to EPRS or Snail1 to change the interaction (binding) level between the two, or a method by which the interaction (binding) between EPRS and Snail1 of the EPRS-Snail1 protein complex that has been previously formed in cells is removed by a test agent.

[0083] The test agents need not essentially functionally inhibit expression and inherent functions of EPRS or Snail1, and merely inhibiting the interaction (binding) between EPRS and Snail1 is enough.

[0084] According to one or more exemplary embodiments, the screening may be performed by various methods known in the art, such as protein-protein binding assay in a labeled test tube (in vitro full-down assay), EMSA, immunoassay for protein binding, functional assay (phosphorylation assay, etc.), yeast-2 hybrid assay, non-immunoprecipitation assay, immunoprecipitation western blot assay, immuno-co-localization assay, and the like, but are not limited thereto.

[0085] For example, yeast-2 hybrid assay may be carried out by using yeast expressing EPRS and Snail1, or parts or homologues of these proteins, fused with the DNA-binding domain of bacteria repressor LexA or yeast GAL4 and the transactivation domain of yeast GAL4 protein, respectively (KIM, M. J. et al., Nat. Gent., 34:330-336, 2003). The interaction between EPRS and Snail1 reconstructs a transactivator that induces the expression of a reporter gene under the control of a promoter having a regulatory sequence binding to the DNA-binding domain of LexA or GAL4 protein.

[0086] As described above, the reporter gene may be any gene that is known in the art and encodes a detectable polypeptide. For example, chloramphenicol acetyl transferase (CAT), luciferase, β-galactosidase, β-glucosidase, alkaline phosphatase, green fluorescent protein (GFP), or the like may be used. If the binding between EPRS and Snail1, or parts or homologues of these proteins is degraded or weakened by a test agent, the reporter gene is not expressed, or expressed less than under a normal condition.

[0087] Further, as the reporter gene, one that encodes a protein enabling the growth of yeast (i.e., the growth of yeast is inhibited if the reporter gene is not expressed) may be selected. For example, auxotropic genes that encode enzymes involved in biosynthesis for obtaining amino acids or nitrogen bases (e.g., yeast genes, such as ADE3 and HIS3, or similar genes from other species) may be used. In cases where the binding of EPRS and Snail1, or parts or homologues of these proteins, expressed in this system, is inhibited by a test agent, the reporter gene is not expressed. Accordingly, the growth of yeast is stopped or retarded under such a condition. Such an effect by the expression of the reporter gene may be observed with the naked eye or by using a device (e.g., a microscope).

[0088] After steps (a) and (b), step (c) below may be further carried out: (c) contacting the test agent, which has changed the binding level between EPRS and Snail1 in step (b), with cells expressing Snail1, together with TGF-β1, and then verifying the EMT inhibitory effect in the cells.

[0089] TGF-β1 is known to induce the transition from the cell epithelial phenotype to the invasive mesenchymal phenotype, that is, EMT. Snail1 is known to be relevant to the EMT phenotype, and the abundance (expression level) of Snail1 increases by TGF-β1 treatment (example 1). Therefore, in step (c), an additional process of treating any cell expressing Snail1 (especially, normal epithelial cells or the like) with TGF-β1 to induce EMT, and then verifying whether the test agent primarily selected through step (b) actually has a therapeutic effect on the EMT symptom.

[0090] In one or more exemplary embodiments, EPRS interacts with (binds to) Snail1 to provoke other EMT-related diseases, such as cancer and fibrosis, through the EMT pathway, and thus the test gene, which has changed the binding level between EPRS and Snail1 in step (b), can inhibit EMT.

[0091] As long as the cells expressing Snail1 are any known Snail1-expressing cells, the kind thereof is not particularly limited, but the cells expressing Snail1 may be epithelial cells, tumor cells, and fibrosis cells. The epithelial cells (normal epithelial cells) refer to cells that cover surfaces of the animal body or inner surface of blank spaces or tracts (internal organ tracts or the like), and the sites from which cells are derived, such as retina, colon, small intestine, blood vessels, skin, and the like, are not particularly limited.

[0092] Examples of cancer cells may be cells selected from the group consisting of non-small cell lung cancer cells, small cell lung cancer cells, melanoma cells, leukemia cells, colon cancer cells, liver cancer cells, gastric cancer cells, esophageal cancer cells, pancreatic cancer cells, gallbladder cancer cells, kidney cancer cells, bladder cancer cells, prostate cancer cells, testicular cancer cells, cervical cancer cells, endometrial cancer cells, choriocarcinoma cells, ovarian cancer cells, breast cancer cells, thyroid cancer cells, brain cancer cells, head and neck cancer cells, skin cancer cells, lymphoma cells, aplastic anemia cells, bile duct cancer cells, oral cancer cells, peritoneal cancer cells, small intestine cancer cells, and eye tumor cancer cells, or may be cells derived or differentiated therefrom, but are not limited thereto.

[0093] Examples of the fibrosis cells may be cells selected from the group consisting of renal fibrosis cells, hepatic fibrosis cells, pulmonary fibrosis cells, skin fibrosis cells, cardiac fibrosis cells, joint fibrosis cells, nerve fibrosis cells, muscular fibrosis cells, and peritoneal fibrosis cells, or may be cells derived or differentiated therefrom, but are not limited thereto.

[0094] The term “verifying the EMT inhibitory effect” refers to verifying whether a test agent inhibits the EMT progress provoked by TGF-β1 treatment in cells, and may be conducted through a comparison with, as a control group, Snail1-expressing cells treated with TGF-β1 but without the test agent. The method for verifying the EMT inhibitory effect may be conducted by confirming expression levels of known EMT markers, or confirming whether cell phenotypes exhibited by EMT, such as cell migration and cell invasion, are shown by known methods (e.g., cell migration assay, cell invasion assay), but is not limited thereto.

[0095] The term “EMT marker” refers to a protein that exhibits the expression which is specifically changed during the EMT, when compared with the normal state. As long as the EMT maker is any known EMT marker, the kind thereof is not particularly limited, but preferably, it may be one that can confirm the change in the expression of at least one marker protein selected from the group consisting of p-SMAD3, SMAD2/3, SLUG, E-cadherin, and N-cadherin.

[0096] The screening method of one or more exemplary embodiments may be conducted by using various biochemical and molecular biological techniques known in the art. The techniques are disclosed in the documents: Sambrook et al., Molecular Cloning: A Laboratory Manual, Cold Spring Harbor Press, N.Y., Second (1998) and Third (2000) Editions; and Ausubel et al., Current Protocols in Molecular Biology, John Wiley & Sons, Inc., New York (1987-1999).

[0097] Preferably, prior to the screening method including steps (a) and (b), or (a) to (c), the test agent may be first selectively assayed for its ability to modulate biological activity of EPRS or Snail1 (first assay stage). Specifically, in the first assay stage, the biological activity of EPRS or Snail1 isolated in the presence of the test gene is assayed to identify a modulating agent that modulates biological activity of the polypeptide. More preferably, exemplary embodiments may include the following steps: (i) contacting test agents with EPRS or Snail1 in the presence of the test agents; (ii) measuring activity of EPRS or Snail1 to select a test agent that changes the activity thereof.

[0098] In the first assay stage, the modulations of several biological activities of EPRS or Snail1 may be assayed. For example, a test agent may be assayed for its activity to modulate the expression level, e.g., transcription or translation. The test agent may also be assayed for its activity to modulate the intercellular level or stability, e.g., post-translational modification or proteolysis.

[0099] The modulating agent that changes biological activity is identified by the first assay stage, and then the test agent is tested for whether it has the ability to change the interaction between EPRS and Snail1, by the screening method of one or more exemplary embodiments including steps (a) and (b) or (a) to (c) (a second assay stage).

[0100] In both of the first and second assay stages, intact EPRS, and its fragments, analogs, or functional equivalents may be used. The fragments that can be used in the assays generally retain at least one biological activity of EPRS. In addition, fusion proteins including the fragments or analogs may be used to screen test agents. The functional equivalents of EPRS retain the same biological activities as EPRS although they have amino deletion and/or insertion and/or substitution, and thus can be used in the screening method of one or more exemplary embodiments, which is described above.

[0101] Various assays that are conventionally implemented in the art may be employed to identify EPRS or Snail1, or test agents that regulate the interaction therebetween. Preferably, the test agents may be screened by a cell-based assay system. For example, in a typical cell based assay for screening (i.e., the second test stage), the activity of the reporter gene (e.g., enzymatic activity) is measured in the presence of a test agent, and compared to the activity of the reporter gene in the absence of the test agent. The reporter gene may encode any detectable polypeptide (response or reporter polypeptide) known in the art, e.g., a polypeptide that is detectable by fluorescence or phosphorescence or by the enzymatic activity retained therein. The detectable response polypeptide may be, e.g., luciferase, alpha-glucuronidase, alpha-galactosidase, chloramphenicol acetyl transferase, green fluorescent protein, enhanced green fluorescent protein, and human secreted alkaline phosphatase.

[0102] In the cell-based assay, the test agent (e.g., a peptide or a polypeptide) may also be expressed by a different vector present in the host cell. In some methods, a library of test agents is encoded by a library of such vectors (e.g., a cDNA library). Such a library may be created by methods well known in the art (Sambrook et al. and Ausubel et al., supra), or obtained from a variety of commercial sources.

[0103] In addition to the foregoing cell based assay, the test agents may be screened by a non-cell based method. The method encompasses, for example, mobility shift DNA-binding assay, methylation and uracil interference assay, DNase and hydroxyl radical footprinting analysis, fluorescence polarization, and UV crosslinking or cross-linkers. A general overview is disclosed in Ausubel et al. (Ausubel et al., supra, chapter 12, DNA-Protein Interaction). One technique for isolating co-associating proteins including nucleic acid and DNA/RNA binding proteins includes the use of UV crosslinking or chemical cross-linkers, including cleavable cross-linkers dithiobis (succinimidylpropionate) and 3, 3′-dithiobis (sulfosuccinimidyl-propionate) (McLaughlin, Am. J. Hum. Genet., 59:561-569, 1996; Tang, Biochemistry, 35:8216-8225, 1996; Lingner, Proc. Natl. Acad. Sci. U.S.A., 93:10712, 1996; and Chodosh, Mol. Cell. Biol., 6:4723-4733, 1986).

[0104] Hereinafter, the first assay and the second assay will be described in detail.

[0105] The first assay is for screening agents that bind to EPRS or Snail1 or regulating the binding, and the present assay may be selectively employed according to the need of a person skilled in the art. Hereinafter, EPRS will be given as an example. Specifically, in the first assay, the binding of a test agent to EPRS may be assayed by various methods, such as labeled in vitro protein-protein binding assay, electrophoretic mobility shift assay, immunoassay for detecting protein binding, functional assay (phosphorylation assay, etc.), and the like (U.S. Pat. Nos. 4,366,241: 4,376,110; 4,517,288 and 4,837,168; and Bevan et al., Trends in Biotechnology, 13:115-122, 1995; Ecker et al., Bio/Technology, 13:351-360, 1995; and Hodgson, Bio/Technology, 10:973-980, 1992). The test agent may be identified by detecting a direct binding with EPRS, for example, co-immunoprecipitation with the EPRS polypeptide (or protein) by an antibody against EPRS. The test agent may also be identified by detecting a signal that can indicate the binding of EPRS and the test agent, e.g., fluorescence quenching.

[0106] Competition assays provide a suitable format for identifying test agents that specifically bind to EPRS. In such a format, test agents are screened in competition with a compound already known to bind to EPRS. The known binding compound may be a synthetic compound. It can also be an antibody that specifically recognizes EPRS, e.g., a monoclonal antibody against EPRS. If the test agent inhibits the binding between EPRS and the known compound, the test agent may bind to EPRS. Numerous types of competitive binding assays are known in the art, for example, solid phase direct or indirect radioimmunoassay (RIA), solid phase direct or indirect enzyme immunoassay (EIA), sandwich competition assay (Stahli et al., Methods in Enzymology, 9:242-2453, 1983); solid phase direct biotin-avidin EIA (Kirkland et al., J. Immunol., 137:3614-3619, 1986); solid phase direct labeled assay, solid phase direct labeled sandwich assay (Harlow and Lane, Antibodies, A laboratory Manual, Cold Spring Harbor Press, 1988); solid phase direct label RIA using ¹²⁵I (Morel et al., Mol. Immuno., 25(1); 7-15, 1988; solid phase direct biotin-avidin EIA (Cheung et al., Virology, 176:546-552, 1990); and direct labeled RIA (Moldenhauer et al., Sacnd. J. Immunol., 32:77-82, 1990). Typically, the above assays involve the use of purified polypeptide bound to a solid surface or cells bearing an unlabelled test agent and a labeled reference compound. Competitive inhibition is measured by determining the amount of label bound to the solid surface or cells in the presence of the test agent. Modulating agents to be identified by competition assay include agents that bind to the same epitope as the control compound and agents that bind to an adjacent epitope sufficiently proximal to the epitope bound by the control compound in order to allow steric hindrance to occur. Usually, when competitive inhibition is excessively present, the specific binding of the control group to a general target polypeptide will be inhibited by at least 50 or 75%.

[0107] The screening assay may be in an insoluble or soluble format. One example of the insoluble assays is to immobilize EPRS or a fragment thereof onto a solid phase matrix. Then, the solid phase matrix is contacted with test agents for a time period sufficient to allow the test agents to bind. After that, any unbound material is washed away from the solid phase matrix, and then the presence of the agent bound to the solid phase is identified. The method may further include a step of eluting the bound agent from the solid phase matrix, thereby isolating the agent. Alternatively, another method for immobilizing EPRS is to allow the test agents bind to the solid matrix and then add EPRS.

[0108] The soluble assay includes some of the combinatory libraries screening methods described above. Under the soluble assay format, neither the test agents nor EPRS binds to a solid support. The binding of EPRS or the fragment thereof to a test agent may be determined by, e.g., fluorescence of EPRS and/or the test agents. Fluorescence may be intrinsic or conferred by labeling a component with a fluorophor.

[0109] In some binding assays, EPRS, the test agent, or a third material (e.g., an antibody binding to EPRS) may be provided in a labeled state, in order to facilitate identification, detection and quantification of the polypeptide in a given condition. That is, EPRS, the test agent, or the third material may be provided by being covalently attached or linked to a detectable label or group, or cross-linkable group. These detectable groups include a detectable polypeptide group, e.g., an assayable enzyme or antibody epitope. Alternatively, the detectable group may be selected from other detectable groups or labels, such as radioactive isotopes (e.g., ¹²⁵I, ³²P, and ³⁵S) or a chemiluminescent or fluorescent group. Similarly, the detachable group may be a substrate, a cofactor, an inhibitor, or an affinity ligand.

[0110] In the first assay, the binding of EPRS and the test agent indicates that the test agent is an EPRS modulator. The binding also indicates that the agent can modulate biological activity of Snail, preferably Snail1. Therefore, the test agent binding to EPRS needs to be further tested for whether the test agent has ability to modulate activity of Snail1.

[0111] Alternatively, the test agent binding EPRS may be further examined in order to measure its activity on EPRS. The presence, nature, or extent of such activity may be tested by an activity assay. The activity assay may confirm that the binding of the test agent to EPRS actually has a modulatory activity on SPIK. More often, the activity assays may be independently employed to identify test agents that modulate activity of EPRS (i.e., without the first step of assaying the ability to bind to EPRS). Generally, the above methods include adding the test agent to a sample containing EPRS in the presence or absence of a different material or reagent necessary for testing biological activity of EPRS, and measuring a change in biological activity of EPRS. In addition to the assay for screening enzymes or other biological activity of EPRS, the activity assay includes in vitro screening and in vivo screening for the expression of EPRS or the change in the intracellular level.

[0112] The second assay stage means performing the screening method of one or more exemplary embodiments including steps (a) and (b) or steps (a) to (c). Once it is identified that the test agent binds to EPRS and/or modulates biological activity (including intracellular level) of EPRS in the first assay, the test agent may be further tested for whether it regulates the EMT pathway through Snail1, and further whether the test agent has the ability to prevent or treat the EMT-related (mediated) diseases. The regulation by the modulating agent is generally tested in the presence of EPRS. If the cell-based screening system is employed, EPRS may be expressed from an expression vector introduced into the host cell. Alternatively, EPRS may be inherently supplied by host cells.

[0113] Hereinafter, further exemplary embodiments will be described in detail.

[0114] However, the following examples are merely for illustrating the inventive concept, and are not intended to limit the scope of the present invention.

[0115] <Methods>

[0116] 1. Cell Culture and Materials

[0117] Below mentioned cell lines of non-small cell lung cancer (NSCLC) and normal cell line were used in this experiment: adenocarcinoma (A549, HCC44), large-cell (H1299), embryonic kidney cell line HEK293T cell line.

[0118] HCC44 and H1299 NSCLC cell lines were maintained in RPMI and HEK293T cells were maintained in DMEM containing 10% fetal bovine serum with 1% antibiotics at 37° C. in a 5% CO₂ incubator. For transiently transfection, Fugene HD (Roche) and Lipofectamine 2000 (Invitrogen) were used and for siRNA transfection, Lipofectamine RNAiMAX (Inbitorgen) reagents were used, following the manufacturer's instruction. Nuclear and cytosol extracts were obtained using a commercial kit of nuclear fractionation (Active motif) and TGF-β1 (10 ng/ml) was purchased from R&D systems.

[0119] 2. Plasmid and siRNA

[0120] cDNA encoding human EPRS (SEQ ID NO: 1) was purchased from Origene, and the EPRS cDNA represented by SEQ ID NO: 8, and each of cDNAs represented by SEQ ID NO: 9 and SEQ ID NO: 9, which encode ERS-WHEP domain (SEQ ID NO: 2) and WHEP-PRS domain (SEQ ID NO: 4), respectively, together with Strep tag (located at the N-terminal of a target protein) were subcloned into pEXPR-IBA-105(iba) plasmids. The thus constructed expression vectors pEXPR-2×IBA105-EPRS, pEXPR-IBA105-ERS, and pEXPR-IBA105-PRS were allowed to selectively transfect cells for the respective experiments. In addition, human Flag-tagged EPRS expression vector was purchased from Origene.

[0121] For the expression of Snail1, the pCMV-Tag2B N-terminal Flag-tagged Snail1 expression vector was purchased from Addgene. In addition, the Strep-tagged Snail expression vector (pEXPR-IBA105-Snail1) was constructed using pEXPR-IBA-105 vector in the same manner as described above. The pEXPR-IBA105-Snail1 expression vector expresses the Snail1 protein of SEQ ID NO: 15, including the DNA sequence represented by SEQ ID NO: 16.

[0122] As a control group, Strep-tag empty vector and Flag-tag empty vector were constructed by tagging only Strep or Flag to the pEXPR-IBA-105 vector. In addition, the HA-tagged ubiquitin expression vector was purchased from Addgene.

[0123] Human EPRS gene specific siRNA (si-EPRS) including a sense strand of SEQ ID NO: 23 and an antisense strand of SEQ ID NO: 24, and non-silencing control siRNA (si-control, Catalog Number: 4390843) were purchased from Invitrogen Silencer Select siRNAs products.

[0124] 3. Cell Migration Assay

[0125] Cell migration assays with A549 cells were performed in Transwell chambers (8.0 μM pore, Costar). Fibronectin (10 μg/ml, BD Biosciences) was coated on the membrane and 700 μl serum-free RPMI was placed in the bottom chamber. After A549 cells were trypsinized and centrifuged at 1,000 rpm for 5 minutes, serum-free RPMI was added to the cells for suspension. Then, 1×10⁵ cells were dropped into 24-well Transwell chambers and incubated for 12 h at 37° C. in a CO₂ incubator. After washing the membrane twice with PBS, 70% methyl alcohol in PBS was used for cell fixation. PBS washing was performed three times afterwards and hematoxylin (Sigma) was used for cell staining After washing the membrane with distilled water several times, non-migrant cells from the top were removed by using cotton swab. Then, the membranes were mounted with Gel Mount (Biomeda). For counting migrant cells, three randomly picked places were magnified with microscopes in high-power fields (×10, and ×20). All samples were performed in triplicate.

[0126] 4. Immunoprecipitation (IP)

[0127] HEK293T cells transiently co-transfected with Strep-tagged EPRS and Flag-tagged Snail were lysed with 20 mM Tris-HCl (pH 8.0) buffer containing 150 mM NaCl, 1% Triton X-100, 1 mM EDTA, 10% glycerol, and protease inhibitor (Calbiochem). To purify Strep-tagged protein, using MagStrep Type 2HC beads (IBA lifesciences) followed by manufacturer's instruction.

[0128] For the detection of endogenous EPRS interaction with Snail1 in nucleus and cytosol, the protein extracts were incubated with protein A agarose (Life technologies) for 30 minutes on ice, and then centrifuged to remove nonspecific IgG binding proteins. The pre-cleared supernatants were mixed with anti-EPRS antibody, incubated the mixture for 2 h at 4° C. with gentle agitation, added protein A agarose for 2 h, and centrifuged. After washing the precipitates with the cold lysis buffer 3-5 times, the precipitates were dissolved in the 2×SDS sample buffer and separated by SDS-PAGE.

[0129] 5. Ubiquitination Assay

[0130] To examine the effects of EPRS on Snail1 ubiquitination, HA-tagged ubiquitin was co-transfected with Strep-Snail and Flag-Mock or Flag-EPRS in the presence of 50 μM MG132 for 4 h before harvest. The cell lysates were immunoprecipitated with streptavidin agarose (GE healthcare lifesciences). The beads were washed three times with the cold washing buffer, the precipitates were dissolved in the 2×SDS sample buffer and subjected to SDS-PAGE. Subsequently, Western blot analysis was performed with anti-HA antibody.

[0131] 6. Western Blot Analysis

[0132] Cells were lysed with lysis buffer (20 mM Tris-HCl (pH 8.0) buffer containing 150 mM NaCl, 1% Triton X-100, 1 mM EDTA, 10% glycerol, and protease inhibitor) and collected in a 1.5 ml tube and incubated in 4° C. with gentle agitation for 15 minutes. Then, centrifuged at 15,000 rpm for 20 minutes in 4° C. and supernatants were collected and quantified by using Bradford reagent. After 5×SDS sample buffer was added, each sample were boiled in 100° C. for 5 minutes. Protein samples were separated by SDS-PAGE, transferred to nitrocellulose membrane, and immunoblotted with specific antibodies. The blots were then reacted with horseradish peroxidase-coupled anti-mouse and anti-rabbit (Pierce) IgG secondary antibody. Signals were developed with ECL-PLUS detection reagent (GE healthcare lifesciences).

[0133] The antibodies specific to the respective marker proteins, used in the present experiment, are as follows: StrepMAB classic-HRP (IBA), Monoclonal anti-FLAG M2-HRP (Sigma), anti-Snail1 (Cell signaling), anti-Slug (Cell signaling), anti-L13a (Cell signaling), anti-p-Smad2 (Cell signaling), anti-p-Smad3 (Cell signaling), anti-E-cadherin (Cell signaling), anti-N-cadherin (Cell signaling), anti-HDAC1 (Bio vision), anti-β-actin (SCBT), anti-Tubulin (Sigma), anti-HSP90 alpha/β (SCBT), anti-p84 (SCBT), and anti-HA (SCBT). The anti-EPRS antibody was prepared through a conventional procedure by which the EPRS protein represented by SEQ ID NO: 1 was injected into a New Zealand white rabbit to cause an immune response, thereby obtaining an antibody.

[0134] 7. qRT-PCR Assay

[0135] A treatment group and a non-treatment group were prepared by treating A549 cells transfected with the strep-tag empty vector or strep-tagged EPRS expression vector with or without TGF-β1 (10 ng/ml) for 12 hours. After that, all RNAs were extracted using the GeneJET RNA Purification kit (Thermo Scientific). cDNA was synthesized using RNA 2 μg through the Maxima first strand cDNA synthesis kit for RT-qPCR (Thermo Scientific, #K1641) according to the manufacturer's protocol. qRT-PCR was carried out using the cDNA template, SYBR green Master MIX with ROX solution (Thermo Scientific), and 0.3 uM of forward and reverse primers listed in table 1 below, through the ABI 7500 instrument (life technologies). The qRT-PCR was conducted at 95° C. for denaturation and 60° C. for primer annealing/polymerase extension.

TABLE 1

| | | | SEQ |
|---|---|---|---|
| Target | Direction | Sequence | ID NO |
| EPRS | Forward | 5′-ATCCGCGTTAGAGCTGATTT-3′ | 17 |
| EPRS | Reverse | 5′-TAATGGGAACTCCCTTGAGC-3′ | 18 |
| SNAIL1 | Forward | 5′-CCTCCCTGTCAGATGAGGAC-3′ | 19 |
| SNAIL1 | Reverse | 5′-CCAGGCTGAGGTATTCCTTG-3′ | 20 |
| GAPDH | Forward | 5′-CAATGACCCCTTCATTGACC-3′ | 21 |
| GAPDH | Reverse | 5′-GACAAGCTTCCCGTTCTCAG-3′ | 22 |

[0136] 8. Cell Invasion Assay

[0137] Cell invasion assay using A549 cells were conducted in the Matrigel invasion chamber manufactured by BD Co. According to the manufacturer's protocol, the matrigel was rehydrated for two hours and 750 μl of the serum-free RPMI was located in a lower chamber. The A549 cells were trypsinized, and then centrifuged at 1,000 rpm for 5 minutes. The serum-free RPMI was added to the cells to prepare a suspension. Then, 1×10⁵ cells were put in the upper chamber, and then incubated in a CO₂ incubator at 37° C. for 12 hours. The membrane was washed two times with PBS, and the cells were fixed using PBS containing 70% methyl alcohol. Then, the membrane was washed three times with PBS, and then the cells were stained with hematoxylin (Sigma). The membrane was washed several times with distilled water, and then immobilized cells above were removed using cotton swabs. Then, the membrane was mounted on the Gel Mount (Biomeda). For counting moving cells, three randomly selected regions were magnified through the microscope. All samples were repeatedly tested three times.

### Example 1

### Verification on Interaction Between Nucleus EPRS and Snail1

[0138] <1-1> Verification on Interaction at Endogenous Level of Cancer Cells

[0139] The interaction between EPRS and Snail1 were verified at the endogenous level of cytoplasm and nucleus. A549 cells were treated with TGF-β1 of different concentrations (0, 1, 10, 20 ng/ml) for 48 hours, fractionated into the cytoplasm and the nucleus, and then subjected endo-IP using protein A-agarose beads (Invitrogen) and EPRS antibody.

[0140] The sample subjected to IP was immunoblotted with Snail1 antibody, and as a result, it was confirmed that the higher the concentration of TGF-β1, the stronger the binding between EPRS and Snail1, as shown in FIG. 1.

[0141] <1-2> Verification on Interaction by Co-Transfection

[0142] The interaction between EPRS and Snail1 was verified through IP after co-transfection of the proteins. HEK293T cells were co-transfected with (1) FLAG-tag empty vector and STREP-tag empty vector, (2) FLAG-tag empty vector and STREP-tagged Snail1 expression vector, (3) FLAG-tagged EPRS expression vector and STREP-tag empty vector, (4) FLAG-tagged EPRS expression vector and STR EP-tagged Snail1 expression vector, that is, in a total of four types of conditions, and then respective proteins were overexpressed, and then IP was performed using the anti-FLAG M2 affinity gel (Sigma).

[0143] The samples subjected to FLAG IP under the four types of conditions were immunoblotted with the STREP antibody, and as a result, it was confirmed that the overexpressed EPRS and Snail1 react with each other, as shown in FIG. 2.

[0144] <1-3> Verification on Interaction in Snail1 Overexpression Condition

[0145] The interaction between EPRS and Snail1 was verified through IP after Snail1 overexpression. HEK293T cells were transfected with 1) STREP-tag empty vector and (2) STREP-tagged Snail1 expression vector, that is, in a total of two types of conditions, and then respective proteins were overexpressed, and then IP was performed using MagSTREP type 2HC beads (IBA).

[0146] The samples subjected to STREP IP under the two types of conditions were immunoblotted with the EPRS antibody, and the results were shown in FIG. 3. The EPRS band was not observed in the empty vector overexpressed sample, and the EPRS band was observed in the Snail1 overexpressed sample. That is, the interaction between the overexpressed Snail1 and EPRS was verified. Here, in order to validate that the overexpressed Snail1 was well subjected to IP, HDAC1, which is known to interact with Snail1 was immunoblotted together. In order to verify whether components that are known to form the GAIT complex together with EPRS by IFN-r signaling to regulate translation (Mukhopadhyay, Jia et al. 2009) also interact with Snail1, L13a, which is one of such components, was immunoblotted. As a result, the interaction with Snail1 was not observed.

[0147] <1-4> Verification on Interaction Between EPRS Fragment and Snail1

[0148] EPRS was divided into ERS-WHEP domain (SEQ ID NO: 2), WHEP-PRS domain (SEQ ID NO: 4), and EPRS (SEQ ID NO: 1), and then the interaction with Snail1 and each domain was verified through IP after co-transfection. HEK293T cells were transfected with (1) STREP-tag empty vector and FLAG-tag empty vector, (2) STREP-tagged ERS-WHEP expression vector and FLAG-tagged Snail1 expression vector, (3) STREP-tagged WHEP-PRS expression vector and FLAG-tagged Snail1 expression vector, and (4) STREP-tagged EPRS expression vector and FLAG-tagged Snail1 vector, in a total of four types of conditions, and then respective proteins were overexpressed, and then IP was performed using MagSTREP type 2HC.

[0149] The samples subjected to STREP IP under the four types of conditions were immunoblotted with the FLAG antibody, and as a result, it was confirmed that the overexpressed ERS-WHEP, WHEP-PRS, and EPRS react with Snail1, as shown in FIG. 4. Of these, the interaction with Snail1 was observed to be stronger in WHEP-PRS rather than in ERS-WHEP and EPRS.

### Example 2

### Verification on Increase in Snail1 Stability of EPRS Through Physical Interaction

[0150] <2-1> Verification on Effect at Protein Level

[0151] For an experiment to verify how the EPRS overexpression affects the expression of Snail1, each type of A549, HCC44, and 293T cells were divided into a total of four types of experimental groups: (1) an experimental group untreated with TGF-β1 after overexpression of the empty vector, (2) an experimental group treated with TGF-β1 after overexpression of the empty vector, (3) an experimental group untreated with TGF-β1 after overexpression of EPRS, and (4) an experimental group treated with TGF-β1 after overexpression of EPRS. Here, the groups treated with TGF-β1 were prepared by treatment at a concentration of 10 ng/ml for 1 hour. The cells of the four experimental groups were lysed, and then immunoblotted with Snail1 antibody, respectively.

[0152] As a result, it was confirmed from FIGS. 5A, 5B, and 5C that, in all of A549, HCC44, 293T cell stains, the EPRS overexpression increased the Snail expression even without TGF-β1 treatment, and the TGF-β1 treatment grew the increase ratio, through the immunoblotting using Snail1 antibody.

[0153] Besides, it was confirmed from FIG. 5D that, in H1299 cells, as the expression level of EPRS gradually increased, the expression level of Snail1 also further increased through the immunoblotting using Snail1 antibody (in FIG. 5D, the sign “ [symbol] ” means that the expression level of the corresponding protein (that is, EPRS) increases in the cells).

[0154] <2-2> Verification at mRNA Expression Level

[0155] For an experiment to verify how the EPRS overexpression affects the change in the mRNA level of Snail1, A549 cells were divided into a total of four types of experimental groups: (1) an experimental group untreated with TGF-β1 after overexpression of the empty vector, (2) an experimental group treated with TGF-β1 after overexpression of the empty vector, (3) an experimental group untreated with TGF-β1 after overexpression of EPRS, and (4) an experimental group treated with TGF-β1 after overexpression of EPRS, and then qRT-PCR was conducted. Here, the groups treated with TGF-β1 were prepared by treatment at a concentration of 10 ng/ml for 12 hours.

[0156] As a result, as shown in FIG. 6, the EPRS overexpression did not change the relative mRNA level of Snail1. Thus, it may be predicted that EPRS may interact with Snail in a manner except for regulating the mRNA of Snail1.

[0157] <2-3> Verification on Increase in Snail1 Stability of EPRS

[0158] For an experiment to verify whether EPRS increases Snail1 stability, through the treatment with MG132 as a proteasomal inhibitor, HEK293T cells were divided into a total of eleven types of experimental groups: experimental groups co-transinfected with (1) STREP-tag empty vector and FLAG-tag empty vector, (2) STREP-tag empty vector and FLAG-tagged Snail1, (3) STREP-tagged WHEP-PRS and FLAG-tag empty vector, (4) STREP-tagged ERS-WHEP and FLAG-tag empty vector, (5) STREP-tagged EPRS and FLAG-tag empty vector, (6), (7), and (8) FLAG-tag Snail1 instead of FLAG-tag empty vector in (3), (4), and (5) above, and (9), (10), and (11) further treated with 50 μM of MG132 for 6 hours in (6), (7), and (8) above. The cells for the above experimental groups were lysed, and immunoblotted with anti-Flag antibody, respectively.

[0159] As a result, as shown in FIG. 7, it was observed that the protein expression level of Snail1 increased more when overexpressed together with EPRS through co-transfection than when overexpressed alone, and the WHEP-PRS fragment rather than ERS-WHEP fragment in the EPRS more contributed to the Snail1 stability. This finding is consistent with the results showing that the EPRS overexpression had an effect of inhibiting poly-ubiquitination of Snail1, through the ubiquitination assay in FIG. 8.

[0160] <2-4> Verification on Increase in Snail1 Stability Through EPRS Overexpression

[0161] For an experiment to verify whether the EPRS overexpression regulates the Snail1 stability through the ubiquitination inhibitory action, HA-tagged ubiquitin A549 cells were co-transfected with (1) FLAG-tag empty vector and STREP-tag Snail1, and (2) FLAG-tagged EPRS and STREP-tag Snail1, that is, in a total of two types of conditions, and treated with 50 μM of MG-132 for 6 hours before harvest, and then IP was conducted using Streptavidin beads.

[0162] The samples subjected to IP were immunoblotted with HA antibody. As a result, as shown in FIG. 8, the ubiquitination was reduced in the EPRS overexpressed experimental group. It is well known that Snail1 degradation is regulated by its ubiquitination (Zhou, Deng et al. 2004), and thus it can be predicted that the EPRS overexpression reduces the ubiquitination of Snail1, thereby increasing the Snail1 stability.

### Example 3

### Verification on EMT Progress Inhibiting Effect by Inhibiting Binding Between EPRS and Snail

[0163] <3-1> Verification on Effect of EPRS Knock-Down on Snail1 and EMT Progress

[0164] It was verified how the reduced EPRS affects Snail1 and EMT progress, through EPRS knock-down experiment using siRNA. For each experimental group, A459 cells were treated with si-control or si-EPRS, and treated with or without 10 ng/ml of TGF-β1 for 1 hour or 48 hours. The changes of EMT-related markers (p-SMAD3, SMAD2/3, SLUG EPRS, E-cadherin, and N-cadherin) including Snail1 were observed by immunoblotting for the cytoplasm and the nucleus. HSP90α/β and p84 were used as loading controls for confirming the protein expression levels in the cytoplasm and nucleus each.

[0165] As a result, as shown in FIGS. 9A and 9B, at the time of EPRS knock-down, the Snail1 and p-SMAD3 was reduced and the E-cadherin was increased. This indicates that the EMT progress was suppressed.

[0166] <3-2> Verification on Effect of EPRS Knockdown on Cell Migration

[0167] For an experiment to verify how the reduced EPRS affects cell migration, cell migration was observed for a total of four experimental groups in which A549 cells were treated (1) without TGF-β1 after si-control treatment, (2) with TGF-β1 after si-control treatment, (3) without TGF-β1 after si-EPRS treatment, and (4) with TGF-β1 after si-EPRS treatment. Here, the TGF-β1 treatment groups were treated at a concentration of 10 ng/ml for 12 hours.

[0168] As a result, as shown in FIGS. 10 and 11, the cell migration was reduced at the time of EPRS knock down. Here, the cell migration was reduced in all of the groups treated with and without TGF-β1.

[0169] <3-3> Verification on Effect of EPRS Knock-Down on Cell Invasion

[0170] For an experiment to verify how the reduced EPRS affects cell invasion, cell invasion was observed for a total of four types of experimental groups in which A549 cells were treated (1) without TGF-β1 after si-control treatment, (2) with TGF-β1 after si-control treatment, (3) without TGF-β1 after si-EPRS treatment, and (4) with TGF-β1 after si-EPRS treatment. Here, the groups treated with TGF-β1 were prepared by treatment at a concentration of 10 ng/ml for 12 hours.

[0171] As a result, as shown in FIGS. 12 and 13, the cell invasion as well as the cell migration verified in examples <3-2> were reduced at the time of EPRS knock-down. Here, the cell invasion was reduced in all the groups treated with and without TGF-β1.

[0172] The increases in cell migration and invasion are main characteristics of EMT progress cells (especially, cancer cells), and the above experimental results confirmed that the inhibition of the interaction between EPRS and Snail1 can suppress the EMT progress. This suggests a main target in the development of therapeutic agents for diseases that have been known to be relevant to EMT, such as cancer (metastasis) and fibrosis.

[0173] Although certain exemplary embodiments and implementations have been described herein, other embodiments and modifications will be apparent from this description. Accordingly, the inventive concept is not limited to such embodiments, but rather to the broader scope of the presented claims and various obvious modifications and equivalent arrangements.

What is claimed is:

1. A method for screening an epithelial-mesenchymal transition (EMT) inhibitor, the method comprising:
contacting glutamyl-prolyl-tRNA synthetase (EPRS) having an amino acid sequence, Snail1 protein, and a test agent, the amino acid sequence being selected from the group consisting of SEQ ID NOs: 2 to 6; and
measuring a change in a binding level between the EPRS and the Snail1 protein.

2. The method according to claim 1, wherein the epithelial-mesenchymal transition inhibitor is an agent for preventing or treating diseases or symptoms selected from the group consisting of cancer metastasis, fibrotic disease, angiogenesis, diabetic renal nephropathy, allograft dysfunction, cataracts, and defects in cardiac valve formation.

3. The method according to claim 2, wherein a cancer for the cancer metastasis is selected from the group consisting of non-small cell lung cancer, small cell lung cancer, melanoma, leukemia, colon cancer, liver cancer, gastric cancer, esophageal cancer, pancreatic cancer, gallbladder cancer, kidney cancer, bladder cancer, prostate cancer, testicular cancer, cervical cancer, endometrial cancer, choriocarcinoma, ovarian cancer, breast cancer, thyroid cancer, brain cancer, head and neck cancer, skin cancer, lymphoma, aplastic anemia, bile duct cancer, oral cancer, peritoneal cancer, small intestine cancer, and eye tumor.

4. The method according to claim 2, wherein the fibrotic disease is selected from the group consisting of renal fibrosis, hepatic fibrosis, pulmonary fibrosis, skin fibrosis, cardiac fibrosis, joint fibrosis, nerve fibrosis, muscular fibrosis, and peritoneal fibrosis.

5. The method according to claim 1, wherein the glutamyl-prolyl-tRNA synthetase has an amino acid sequence selected from the group consisting of SEQ ID NO: 1 and SEQ ID NOs: 25 to 123.

6. The method according to claim 1, wherein the Snail1 has an amino acid sequence selected from the group consisting of SEQ ID NO: 15 and SEQ ID NOs: 124 to 203

7. The method according to claim 1, wherein the test agent is at least one agent selected from the group consisting of protein, polypeptide, small organic molecule, polysaccharide, and polynucleotide.

8. The method according to claim 1, further comprising:
contacting the test agent, which has changed the binding level between the EPRS and the Snail1 protein, with cells expressing Snail1, together with TGF-β1, and then verifying an EMT inhibitory effect in the cells.

9. The method according to claim 8, wherein the cells expressing Snail1 are selected from the group consisting of normal epithelial cells, non-small cell lung cancer cells, small cell lung cancer cells, melanoma cells, leukemia cells, colon cancer cells, liver cancer cells, gastric cancer cells, esophageal cancer cells, pancreatic cancer cells, gallbladder cancer cells, kidney cancer cells, bladder cancer cells, prostate cancer cells, testicular cancer cells, cervical cancer cells, endometrial cancer cells, choriocarcinoma cells, ovarian cancer cells, breast cancer cells, thyroid cancer cells, brain cancer cells, head and neck cancer cells, skin cancer cells, lymphoma cells, aplastic anemia cells, bile duct cancer cells, oral cancer cells, peritoneal cancer cells, small intestine cancer cells, eye tumor cancer cells, renal fibrosis cells, hepatic fibrosis cells, pulmonary fibrosis cells, skin fibrosis cells, cardiac fibrosis cells, joint fibrosis cells, nerve fibrosis cells, muscular fibrosis cells, and peritoneal fibrosis cells.

10. The method according to claim 1, wherein the EPRS is full-length EPRS or a fragment of EPRS.

The application's sequence listing, which the Patent Office published only in electronic form, follows.

SEQUENCE LISTING (203 sequences)

SEQ ID NO: 1 - protein, 1512 aa, Artificial Sequence
  Wild type EPRS (whole amino acid sequence)_[Homo sapiens] GenBank: AAI26276.1 accession BC126275.1
MATLSLTVNSGDPPLGALLAVEHVKDDVSISVEEGKENILHVSENVIFTDVNSILRYLARVATTAGLYGSNLMEHTEIDHWLEFSATKLSSCDSFTSTINELNHCLSLRTYLVGNSLSLADLCVWATLKGNAAWQEQLKQKKAPVHVKRWFGFLEAQQAFQSVGTKWDVSTTKARVAPEKKQDVGKFVELPGAEMGKVTVRFPPEASGYLHIGHAKAALLNQHYQVNFKGKLIMRFDDTNPEKEKEDFEKVILEDVAMLHIKPDQFTYTSDHFETIMKYAEKLIQEGKAYVDDTPAEQMKAEREQRIDSKHRKNPIEKNLQMWEEMKKGSQFGQSCCLRAKIDMSSNNGCMRDPTLYRCKIQPHPRTGNKYNVYPTYDFACPIVDSIEGVTHALRTTEYHDRDEQFYWIIEALGIRKPYIWEYSRLNLNNTVLSKRKLTWFVNEGLVDGWDDPRFPTVRGVLRRGMTVEGLKQFIAAQGSSRSVVNMEWDKIWAFNKKVIDPVAPRYVALLKKEVIPVNVPEAQEEMKEVAKHPKNPEVGLKPVWYSPKVFIEGADAETFSEGEMVTFINWGNLNITKIHKNADGKIISLDAKLNLENKDYKKTTKVTWLAETTHALPIPVICVTYEHLITKPVLGKDEDFKQYVNKNSKHEELMLGDPCLKDLKKGDIIQLQRRGFFICDQPYEPVSPYSCKEAPCVLIYIPDGHTKEMPTSGSKEKTKVEATKNETSAPFKERPTPSLNNNCTTSEDSLVLYNRVAVQGDVVRELKAKKAPKEDVDAAVKQLLSLKAEYKEKTGQEYKPGNPPAEIGQNISSNSSASILESKSLYDEVAAQGEVVRKLKAEKSPKAKINEAVECLLSLKAQYKEKTGKEYIPGQPPLSQSSDSSPTRNSEPAGLETPEAKVLFDKVASQGEVVRKLKTEKAPKDQVDIAVQELLQLKAQYKSLIGVEYKPVSATGAEDKDKKKKEKENKSEKQNKPQKQNDGQRKDPSKNQGGGLSSSGAGEGQGPKKQTRLGLEAKKEENLADWYSQVITKSEMIEYHDISGCYILRPWAYAIWEAIKDFFDAEIKKLGVENCYFPMFVSQSALEKEKTHVADFAPEVAWVTRSGKTELAEPIAIRPTSETVMYPAYAKWVQSHRDLPIKLNQWCNVVRWEFKHPQPFLRTREFLWQEGHSAFATMEEAAEEVLQILDLYAQVYEELLAIPVVKGRKTEKEKFAGGDYTTTIEAFISASGRAIQGGTSHHLGQNFSKMFEIVFEDPKIPGEKQFAYQNSWGLTTRTIGVMTMVHGDNMGLVLPPRVACVQVVIIPCGITNALSEEDKEALIAKCNDYRRRLLSVNIRVRADLRDNYSPGWKFNHWELKGVPIRLEVGPRDMKSCQFVAVRRDTGEKLTVAENEAETKLQAILEDIQVTLFTRASEDLKTHMVVANTMEDFQKILDSGKIVQIPFCGEIDCEDWIKKTTARDQDLEPGAPSMGAKSLCIPFKPLCELQPGAKCVCGKNPAKYYTLFGRSY

SEQ ID NO: 2 - protein, 1000 aa, Artificial Sequence
  ERS-WHEP domain _amino acid sequence
MATLSLTVNSGDPPLGALLAVEHVKDDVSISVEEGKENILHVSENVIFTDVNSILRYLARVATTAGLYGSNLMEHTEIDHWLEFSATKLSSCDSFTSTINELNHCLSLRTYLVGNSLSLADLCVWATLKGNAAWQEQLKQKKAPVHVKRWFGFLEAQQAFQSVGTKWDVSTTKARVAPEKKQDVGKFVELPGAEMGKVTVRFPPEASGYLHIGHAKAALLNQHYQVNFKGKLIMRFDDTNPEKEKEDFEKVILEDVAMLHIKPDQFTYTSDHFETIMKYAEKLIQEGKAYVDDTPAEQMKAEREQRIDSKHRKNPIEKNLQMWEEMKKGSQFGQSCCLRAKIDMSSNNGCMRDPTLYRCKIQPHPRTGNKYNVYPTYDFACPIVDSIEGVTHALRTTEYHDRDEQFYWIIEALGIRKPYIWEYSRLNLNNTVLSKRKLTWFVNEGLVDGWDDPRFPTVRGVLRRGMTVEGLKQFIAAQGSSRSVVNMEWDKIWAFNKKVIDPVAPRYVALLKKEVIPVNVPEAQEEMKEVAKHPKNPEVGLKPVWYSPKVFIEGADAETFSEGEMVTFINWGNLNITKIHKNADGKIISLDAKLNLENKDYKKTTKVTWLAETTHALPIPVICVTYEHLITKPVLGKDEDFKQYVNKNSKHEELMLGDPCLKDLKKGDIIQLQRRGFFICDQPYEPVSPYSCKEAPCVLIYIPDGHTKEMPTSGSKEKTKVEATKNETSAPFKERPTPSLNNNCTTSEDSLVLYNRVAVQGDVVRELKAKKAPKEDVDAAVKQLLSLKAEYKEKTGQEYKPGNPPAEIGQNISSNSSASILESKSLYDEVAAQGEVVRKLKAEKSPKAKINEAVECLLSLKAQYKEKTGKEYIPGQPPLSQSSDSSPTRNSEPAGLETPEAKVLFDKVASQGEVVRKLKTEKAPKDQVDIAVQELLQLKAQYKSLIGVEYKPVSATGAEDKDKKKKEKENKSEKQNKPQKQNDGQRKDPSKNQGGGLSSS

SEQ ID NO: 3 - protein, 720 aa, Artificial Sequence
  ERS domain _amino acid sequence
MATLSLTVNSGDPPLGALLAVEHVKDDVSISVEEGKENILHVSENVIFTDVNSILRYLARVATTAGLYGSNLMEHTEIDHWLEFSATKLSSCDSFTSTINELNHCLSLRTYLVGNSLSLADLCVWATLKGNAAWQEQLKQKKAPVHVKRWFGFLEAQQAFQSVGTKWDVSTTKARVAPEKKQDVGKFVELPGAEMGKVTVRFPPEASGYLHIGHAKAALLNQHYQVNFKGKLIMRFDDTNPEKEKEDFEKVILEDVAMLHIKPDQFTYTSDHFETIMKYAEKLIQEGKAYVDDTPAEQMKAEREQRIDSKHRKNPIEKNLQMWEEMKKGSQFGQSCCLRAKIDMSSNNGCMRDPTLYRCKIQPHPRTGNKYNVYPTYDFACPIVDSIEGVTHALRTTEYHDRDEQFYWIIEALGIRKPYIWEYSRLNLNNTVLSKRKLTWFVNEGLVDGWDDPRFPTVRGVLRRGMTVEGLKQFIAAQGSSRSVVNMEWDKIWAFNKKVIDPVAPRYVALLKKEVIPVNVPEAQEEMKEVAKHPKNPEVGLKPVWYSPKVFIEGADAETFSEGEMVTFINWGNLNITKIHKNADGKIISLDAKLNLENKDYKKTTKVTWLAETTHALPIPVICVTYEHLITKPVLGKDEDFKQYVNKNSKHEELMLGDPCLKDLKKGDIIQLQRRGFFICDQPYEPVSPYSCKEAPCVLIYIPDGHTKEMPTSGSKEKTK

SEQ ID NO: 4 - protein, 792 aa, Artificial Sequence
  WHEP-PRS domain _amino acid sequence
VEATKNETSAPFKERPTPSLNNNCTTSEDSLVLYNRVAVQGDVVRELKAKKAPKEDVDAAVKQLLSLKAEYKEKTGQEYKPGNPPAEIGQNISSNSSASILESKSLYDEVAAQGEVVRKLKAEKSPKAKINEAVECLLSLKAQYKEKTGKEYIPGQPPLSQSSDSSPTRNSEPAGLETPEAKVLFDKVASQGEVVRKLKTEKAPKDQVDIAVQELLQLKAQYKSLIGVEYKPVSATGAEDKDKKKKEKENKSEKQNKPQKQNDGQRKDPSKNQGGGLSSSGAGEGQGPKKQTRLGLEAKKEENLADWYSQVITKSEMIEYHDISGCYILRPWAYAIWEAIKDFFDAEIKKLGVENCYFPMFVSQSALEKEKTHVADFAPEVAWVTRSGKTELAEPIAIRPTSETVMYPAYAKWVQSHRDLPIKLNQWCNVVRWEFKHPQPFLRTREFLWQEGHSAFATMEEAAEEVLQILDLYAQVYEELLAIPVVKGRKTEKEKFAGGDYTTTIEAFISASGRAIQGGTSHHLGQNFSKMFEIVFEDPKIPGEKQFAYQNSWGLTTRTIGVMTMVHGDNMGLVLPPRVACVQVVIIPCGITNALSEEDKEALIAKCNDYRRRLLSVNIRVRADLRDNYSPGWKFNHWELKGVPIRLEVGPRDMKSCQFVAVRRDTGEKLTVAENEAETKLQAILEDIQVTLFTRASEDLKTHMVVANTMEDFQKILDSGKIVQIPFCGEIDCEDWIKKTTARDQDLEPGAPSMGAKSLCIPFKPLCELQPGAKCVCGKNPAKYYTLFGRSY

SEQ ID NO: 5 - protein, 512 aa, Artificial Sequence
  PRS domain _amino acid sequence
GAGEGQGPKKQTRLGLEAKKEENLADWYSQVITKSEMIEYHDISGCYILRPWAYAIWEAIKDFFDAEIKKLGVENCYFPMFVSQSALEKEKTHVADFAPEVAWVTRSGKTELAEPIAIRPTSETVMYPAYAKWVQSHRDLPIKLNQWCNVVRWEFKHPQPFLRTREFLWQEGHSAFATMEEAAEEVLQILDLYAQVYEELLAIPVVKGRKTEKEKFAGGDYTTTIEAFISASGRAIQGGTSHHLGQNFSKMFEIVFEDPKIPGEKQFAYQNSWGLTTRTIGVMTMVHGDNMGLVLPPRVACVQVVIIPCGITNALSEEDKEALIAKCNDYRRRLLSVNIRVRADLRDNYSPGWKFNHWELKGVPIRLEVGPRDMKSCQFVAVRRDTGEKLTVAENEAETKLQAILEDIQVTLFTRASEDLKTHMVVANTMEDFQKILDSGKIVQIPFCGEIDCEDWIKKTTARDQDLEPGAPSMGAKSLCIPFKPLCELQPGAKCVCGKNPAKYYTLFGRSY

SEQ ID NO: 6 - protein, 1232 aa, Artificial Sequence
  ERS-PRS domain _amino acid sequence
MATLSLTVNSGDPPLGALLAVEHVKDDVSISVEEGKENILHVSENVIFTDVNSILRYLARVATTAGLYGSNLMEHTEIDHWLEFSATKLSSCDSFTSTINELNHCLSLRTYLVGNSLSLADLCVWATLKGNAAWQEQLKQKKAPVHVKRWFGFLEAQQAFQSVGTKWDVSTTKARVAPEKKQDVGKFVELPGAEMGKVTVRFPPEASGYLHIGHAKAALLNQHYQVNFKGKLIMRFDDTNPEKEKEDFEKVILEDVAMLHIKPDQFTYTSDHFETIMKYAEKLIQEGKAYVDDTPAEQMKAEREQRIDSKHRKNPIEKNLQMWEEMKKGSQFGQSCCLRAKIDMSSNNGCMRDPTLYRCKIQPHPRTGNKYNVYPTYDFACPIVDSIEGVTHALRTTEYHDRDEQFYWIIEALGIRKPYIWEYSRLNLNNTVLSKRKLTWFVNEGLVDGWDDPRFPTVRGVLRRGMTVEGLKQFIAAQGSSRSVVNMEWDKIWAFNKKVIDPVAPRYVALLKKEVIPVNVPEAQEEMKEVAKHPKNPEVGLKPVWYSPKVFIEGADAETFSEGEMVTFINWGNLNITKIHKNADGKIISLDAKLNLENKDYKKTTKVTWLAETTHALPIPVICVTYEHLITKPVLGKDEDFKQYVNKNSKHEELMLGDPCLKDLKKGDIIQLQRRGFFICDQPYEPVSPYSCKEAPCVLIYIPDGHTKEMPTSGSKEKTKGAGEGQGPKKQTRLGLEAKKEENLADWYSQVITKSEMIEYHDISGCYILRPWAYAIWEAIKDFFDAEIKKLGVENCYFPMFVSQSALEKEKTHVADFAPEVAWVTRSGKTELAEPIAIRPTSETVMYPAYAKWVQSHRDLPIKLNQWCNVVRWEFKHPQPFLRTREFLWQEGHSAFATMEEAAEEVLQILDLYAQVYEELLAIPVVKGRKTEKEKFAGGDYTTTIEAFISASGRAIQGGTSHHLGQNFSKMFEIVFEDPKIPGEKQFAYQNSWGLTTRTIGVMTMVHGDNMGLVLPPRVACVQVVIIPCGITNALSEEDKEALIAKCNDYRRRLLSVNIRVRADLRDNYSPGWKFNHWELKGVPIRLEVGPRDMKSCQFVAVRRDTGEKLTVAENEAETKLQAILEDIQVTLFTRASEDLKTHMVVANTMEDFQKILDSGKIVQIPFCGEIDCEDWIKKTTARDQDLEPGAPSMGAKSLCIPFKPLCELQPGAKCVCGKNPAKYYTLFGRSY

SEQ ID NO: 7 - protein, 280 aa, Artificial Sequence
  WHEP domain _amino acid sequence
VEATKNETSAPFKERPTPSLNNNCTTSEDSLVLYNRVAVQGDVVRELKAKKAPKEDVDAAVKQLLSLKAEYKEKTGQEYKPGNPPAEIGQNISSNSSASILESKSLYDEVAAQGEVVRKLKAEKSPKAKINEAVECLLSLKAQYKEKTGKEYIPGQPPLSQSSDSSPTRNSEPAGLETPEAKVLFDKVASQGEVVRKLKTEKAPKDQVDIAVQELLQLKAQYKSLIGVEYKPVSATGAEDKDKKKKEKENKSEKQNKPQKQNDGQRKDPSKNQGGGLSSS

SEQ ID NO: 8 - DNA, 4701 bp, Artificial Sequence
  Wild type EPRS (whole nucleotide sequence)_Homo sapiens glutamyl-prolyl-tRNA synthetase, mRNA (cDNA clone MGC:161553 IMAGE:8991991), complete CDs GenBank: BC126275.1
ccaggcgtactgacaggtggccaggcgtactgacaggtggccaggcgtactgacaggtggccaggcgtactgacaggtggccaggcgtactgacaggtggccaggcgtactgacaggtggaccagcggactggtggagatggcgacgctctctctgaccgtgaattcaggagaccctccgctaggagctttgctggcagtagaacacgtgaaagacgatgtcagcatttccgttgaagaagggaaagagaatattcttcatgtttctgaaaatgtgatattcacagatgtgaattctatacttcgctacttggctagagttgcaactacagctgggttatatggctctaatctgatggaacatactgagattgatcactggttggagttcagtgctacaaaattatcttcatgtgattcctttacttctacaattaatgaactcaatcattgcctgtctctgagaacatacttagttggaaactccttgagtttagcagatttatgtgtttgggccaccctaaaaggaaatgctgcctggcaagaacagttgaaacagaagaaagctccagttcatgtaaaacgttggtttggctttcttgaagcccagcaggccttccagtcagtaggtaccaagtgggatgtttcaacaaccaaagctcgagtggcacctgagaaaaagcaagatgttgggaaatttgttgagcttccaggtgcggagatgggaaaggttaccgtcagatttcctccagaggccagtggttacttacacattgggcatgcaaaagctgctcttctgaaccagcactaccaggttaactttaaagggaaactgatcatgagatttgatgacacaaatcctgaaaaagaaaaggaagattttgagaaggttatcttggaagatgttgcaatgttgcatatcaaaccagatcaatttacttatacttcggatcattttgaaactataatgaagtatgcagagaagctaattcaagaagggaaggcttatgtggatgatactcctgctgaacagatgaaagcagaacgtgagcagaggatagactctaaacatagaaaaaaccctattgagaagaatctacaaatgtgggaagaaatgaaaaaagggagccagtttggtcagtcctgttgtttgcgagcaaaaattgacatgagtagtaacaatggatgcatgagagatccaaccctttatcgctgcaaaattcaaccacatccaagaactggaaataaatacaatgtttatccaacatatgattttgcctgccccatagttgacagcatcgaaggtgttacacatgccctgagaacaacagaataccatgacagagatgagcagttttactggattattgaagctttaggcataagaaaaccatatatttgggaatatagtcggctaaatctcaacaacacagtgctatccaaaagaaaactcacatggtttgtcaatgaaggactagtagatggatgggatgacccaagatttcctacggttcgtggtgtactgagaagagggatgacagttgaaggactgaaacagtttattgctgctcagggctcctcacgttcagtcgtgaacatggagtgggacaaaatctgggcgtttaacaaaaaggttattgacccagtggctccacgatatgttgcattactgaagaaagaagtgatcccagtgaatgtacctgaagctcaggaggagatgaaagaagtagccaaacacccaaagaatcctgaggttggcttgaagcctgtgtggtatagtcccaaagttttcattgaaggtgctgatgcagagactttttcggagggtgagatggttacatttataaattggggcaacctcaacattacaaaaatacacaaaaatgcagatggaaaaatcatatctcttgatgcaaagttgaatttggaaaacaaagactacaagaaaaccactaaggtcacttggcttgcagagactacacatgctcttcctattccagtaatctgtgtcacttatgagcacttgatcacaaagccagtgctaggaaaagacgaggactttaagcagtatgtcaacaagaacagtaagcatgaagagctaatgctaggggatccctgccttaaggatttgaaaaaaggagatattatacaactccagagaagaggattcttcatatgtgatcaaccttatgaacctgttagcccatatagttgcaaggaagccccgtgtgttttgatatacattcctgatgggcacacaaaggaaatgccaacatcagggtcaaaggaaaagaccaaagtagaagccacaaaaaatgagacctctgctccttttaaggaaagaccaacaccttctctgaataataattgtactacatctgaggattccttggtcctttacaatagagtggctgttcaaggagatgtggttcgtgaattaaaagccaagaaagcaccaaaggaagatgtagatgcagctgtaaaacagcttttgtctttgaaagctgaatataaggagaaaactggccaggaatataaacctggaaaccctcctgctgaaataggacagaatatttcttctaattcctcagcaagtattctggaaagtaaatctctgtatgatgaagttgctgcacaaggggaggtggttcgtaagctaaaagctgaaaaatcccctaaggctaaaataaatgaagctgtagaatgcttactgtccctgaaggctcagtataaagaaaaaactgggaaggagtacatacctggtcagcccccattatctcaaagttcggattcaagcccaaccagaaattctgaacctgctggtttagaaacaccagaagcgaaagtactttttgacaaagtagcttctcaaggggaagtagttcggaaacttaaaactgaaaaagcccctaaggatcaagtagatatagctgttcaagaactccttcagctaaaggcacagtacaagtctttgataggagtagagtataagcctgtgtcggccactggagctgaggacaaagataagaagaagaaagaaaaagaaaataaatctgaaaagcagaataagcctcagaaacaaaatgatggccaaaggaaagacccttctaaaaaccaaggaggtgggctctcatcaagtggagcaggagaagggcaggggcctaagaaacagaccaggttgggtcttgaggcaaaaaaagaagaaaatcttgctgattggtattctcaggtcatcacaaagtcagaaatgattgaataccatgacataagtggctgttatattcttcgtccctgggcctatgccatttgggaagccatcaaggacttttttgatgctgagatcaagaaacttggtgttgaaaactgctacttccccatgtttgtgtctcaaagtgcattagagaaagagaagactcatgttgctgactttgccccagaggttgcttgggttacaagatctggcaaaaccgagctggcagaaccaattgccattcgtcctactagtgaaacagtaatgtatcctgcatatgcaaaatgggtacagtcacacagagacctgcccatcaagctcaatcagtggtgcaatgtggtgcgttgggaattcaagcatcctcagcctttcctacgtactcgtgaatttctttggcaggaagggcacagtgcttttgctaccatggaagaggcagcggaagaggtcttgcagatacttgacttatatgctcaggtatatgaagaactcctggcaattcctgttgttaaaggaagaaagacggaaaaggaaaaatttgcaggaggagactatacaactacaatagaagcatttatatctgctagtggaagagctatccagggaggaacatcacatcatttagggcagaatttttccaaaatgtttgaaatcgtttttgaagatccaaagataccaggagagaagcaatttgcctatcaaaactcctggggcctgacaactcgaactattggtgttatgaccatggttcatggggacaacatgggtttagtattaccaccccgtgtagcatgtgttcaggtggtgattattccttgtggcattaccaatgcactttctgaagaagacaaagaagcgctgattgcaaaatgcaatgattatcgaaggcgattactcagtgttaacatccgcgttagagctgatttacgagataattattctccaggttggaaattcaatcactgggagctcaagggagttcccattagacttgaagttgggccacgtgatatgaagagctgtcagtttgtagccgtcagacgagatactggagaaaagctgacagttgctgaaaatgaggcagagactaaacttcaagctattttggaagacatccaggtcacccttttcacaagggcttctgaagaccttaagactcatatggttgtggctaatacaatggaagactttcagaagatactagattctggaaagattgttcagattccattctgtggggaaattgactgtgaggactggatcaaaaagaccactgccagggatcaagatcttgaacctggtgctccatccatgggagctaaaagcctttgcatccccttcaaaccactctgtgaactgcagcctggagccaaatgtgtctgtggcaagaaccctgccaagtactacaccttatttggtcgcagctactgagggatgaacgaaagccccctcttc

SEQ ID NO: 9 - DNA, 3000 bp, Artificial Sequence
  ERS-WHEP domain _nucleotide sequence
atggcgacgctctctctgaccgtgaattcaggagaccctccgctaggagctttgctggcagtagaacacgtgaaagacgatgtcagcatttccgttgaagaagggaaagagaatattcttcatgtttctgaaaatgtgatattcacagatgtgaattctatacttcgctacttggctagagttgcaactacagctgggttatatggctctaatctgatggaacatactgagattgatcactggttggagttcagtgctacaaaattatcttcatgtgattcctttacttctacaattaatgaactcaatcattgcctgtctctgagaacatacttagttggaaactccttgagtttagcagatttatgtgtttgggccaccctaaaaggaaatgctgcctggcaagaacagttgaaacagaagaaagctccagttcatgtaaaacgttggtttggctttcttgaagcccagcaggccttccagtcagtaggtaccaagtgggatgtttcaacaaccaaagctcgagtggcacctgagaaaaagcaagatgttgggaaatttgttgagcttccaggtgcggagatgggaaaggttaccgtcagatttcctccagaggccagtggttacttacacattgggcatgcaaaagctgctcttctgaaccagcactaccaggttaactttaaagggaaactgatcatgagatttgatgacacaaatcctgaaaaagaaaaggaagattttgagaaggttatcttggaagatgttgcaatgttgcatatcaaaccagatcaatttacttatacttcggatcattttgaaactataatgaagtatgcagagaagctaattcaagaagggaaggcttatgtggatgatactcctgctgaacagatgaaagcagaacgtgagcagaggatagactctaaacatagaaaaaaccctattgagaagaatctacaaatgtgggaagaaatgaaaaaagggagccagtttggtcagtcctgttgtttgcgagcaaaaattgacatgagtagtaacaatggatgcatgagagatccaaccctttatcgctgcaaaattcaaccacatccaagaactggaaataaatacaatgtttatccaacatatgattttgcctgccccatagttgacagcatcgaaggtgttacacatgccctgagaacaacagaataccatgacagagatgagcagttttactggattattgaagctttaggcataagaaaaccatatatttgggaatatagtcggctaaatctcaacaacacagtgctatccaaaagaaaactcacatggtttgtcaatgaaggactagtagatggatgggatgacccaagatttcctacggttcgtggtgtactgagaagagggatgacagttgaaggactgaaacagtttattgctgctcagggctcctcacgttcagtcgtgaacatggagtgggacaaaatctgggcgtttaacaaaaaggttattgacccagtggctccacgatatgttgcattactgaagaaagaagtgatcccagtgaatgtacctgaagctcaggaggagatgaaagaagtagccaaacacccaaagaatcctgaggttggcttgaagcctgtgtggtatagtcccaaagttttcattgaaggtgctgatgcagagactttttcggagggtgagatggttacatttataaattggggcaacctcaacattacaaaaatacacaaaaatgcagatggaaaaatcatatctcttgatgcaaagttgaatttggaaaacaaagactacaagaaaaccactaaggtcacttggcttgcagagactacacatgctcttcctattccagtaatctgtgtcacttatgagcacttgatcacaaagccagtgctaggaaaagacgaggactttaagcagtatgtcaacaagaacagtaagcatgaagagctaatgctaggggatccctgccttaaggatttgaaaaaaggagatattatacaactccagagaagaggattcttcatatgtgatcaaccttatgaacctgttagcccatatagttgcaaggaagccccgtgtgttttgatatacattcctgatgggcacacaaaggaaatgccaacatcagggtcaaaggaaaagaccaaagtagaagccacaaaaaatgagacctctgctccttttaaggaaagaccaacaccttctctgaataataattgtactacatctgaggattccttggtcctttacaatagagtggctgttcaaggagatgtggttcgtgaattaaaagccaagaaagcaccaaaggaagatgtagatgcagctgtaaaacagcttttgtctttgaaagctgaatataaggagaaaactggccaggaatataaacctggaaaccctcctgctgaaataggacagaatatttcttctaattcctcagcaagtattctggaaagtaaatctctgtatgatgaagttgctgcacaaggggaggtggttcgtaagctaaaagctgaaaaatcccctaaggctaaaataaatgaagctgtagaatgcttactgtccctgaaggctcagtataaagaaaaaactgggaaggagtacatacctggtcagcccccattatctcaaagttcggattcaagcccaaccagaaattctgaacctgctggtttagaaacaccagaagcgaaagtactttttgacaaagtagcttctcaaggggaagtagttcggaaacttaaaactgaaaaagcccctaaggatcaagtagatatagctgttcaagaactccttcagctaaaggcacagtacaagtctttgataggagtagagtataagcctgtgtcggccactggagctgaggacaaagataagaagaagaaagaaaaagaaaataaatctgaaaagcagaataagcctcagaaacaaaatgatggccaaaggaaagacccttctaaaaaccaaggaggtgggctctcatcaagt

SEQ ID NO: 10 - DNA, 2160 bp, Artificial Sequence
  ERS domain _nucleotide sequence
atggcgacgctctctctgaccgtgaattcaggagaccctccgctaggagctttgctggcagtagaacacgtgaaagacgatgtcagcatttccgttgaagaagggaaagagaatattcttcatgtttctgaaaatgtgatattcacagatgtgaattctatacttcgctacttggctagagttgcaactacagctgggttatatggctctaatctgatggaacatactgagattgatcactggttggagttcagtgctacaaaattatcttcatgtgattcctttacttctacaattaatgaactcaatcattgcctgtctctgagaacatacttagttggaaactccttgagtttagcagatttatgtgtttgggccaccctaaaaggaaatgctgcctggcaagaacagttgaaacagaagaaagctccagttcatgtaaaacgttggtttggctttcttgaagcccagcaggccttccagtcagtaggtaccaagtgggatgtttcaacaaccaaagctcgagtggcacctgagaaaaagcaagatgttgggaaatttgttgagcttccaggtgcggagatgggaaaggttaccgtcagatttcctccagaggccagtggttacttacacattgggcatgcaaaagctgctcttctgaaccagcactaccaggttaactttaaagggaaactgatcatgagatttgatgacacaaatcctgaaaaagaaaaggaagattttgagaaggttatcttggaagatgttgcaatgttgcatatcaaaccagatcaatttacttatacttcggatcattttgaaactataatgaagtatgcagagaagctaattcaagaagggaaggcttatgtggatgatactcctgctgaacagatgaaagcagaacgtgagcagaggatagactctaaacatagaaaaaaccctattgagaagaatctacaaatgtgggaagaaatgaaaaaagggagccagtttggtcagtcctgttgtttgcgagcaaaaattgacatgagtagtaacaatggatgcatgagagatccaaccctttatcgctgcaaaattcaaccacatccaagaactggaaataaatacaatgtttatccaacatatgattttgcctgccccatagttgacagcatcgaaggtgttacacatgccctgagaacaacagaataccatgacagagatgagcagttttactggattattgaagctttaggcataagaaaaccatatatttgggaatatagtcggctaaatctcaacaacacagtgctatccaaaagaaaactcacatggtttgtcaatgaaggactagtagatggatgggatgacccaagatttcctacggttcgtggtgtactgagaagagggatgacagttgaaggactgaaacagtttattgctgctcagggctcctcacgttcagtcgtgaacatggagtgggacaaaatctgggcgtttaacaaaaaggttattgacccagtggctccacgatatgttgcattactgaagaaagaagtgatcccagtgaatgtacctgaagctcaggaggagatgaaagaagtagccaaacacccaaagaatcctgaggttggcttgaagcctgtgtggtatagtcccaaagttttcattgaaggtgctgatgcagagactttttcggagggtgagatggttacatttataaattggggcaacctcaacattacaaaaatacacaaaaatgcagatggaaaaatcatatctcttgatgcaaagttgaatttggaaaacaaagactacaagaaaaccactaaggtcacttggcttgcagagactacacatgctcttcctattccagtaatctgtgtcacttatgagcacttgatcacaaagccagtgctaggaaaagacgaggactttaagcagtatgtcaacaagaacagtaagcatgaagagctaatgctaggggatccctgccttaaggatttgaaaaaaggagatattatacaactccagagaagaggattcttcatatgtgatcaaccttatgaacctgttagcccatatagttgcaaggaagccccgtgtgttttgatatacattcctgatgggcacacaaaggaaatgccaacatcagggtcaaaggaaaagaccaaa

SEQ ID NO: 11 - DNA, 2379 bp, Artificial Sequence
  WHEP-PRS domain _nucleotide sequence
gtagaagccacaaaaaatgagacctctgctccttttaaggaaagaccaacaccttctctgaataataattgtactacatctgaggattccttggtcctttacaatagagtggctgttcaaggagatgtggttcgtgaattaaaagccaagaaagcaccaaaggaagatgtagatgcagctgtaaaacagcttttgtctttgaaagctgaatataaggagaaaactggccaggaatataaacctggaaaccctcctgctgaaataggacagaatatttcttctaattcctcagcaagtattctggaaagtaaatctctgtatgatgaagttgctgcacaaggggaggtggttcgtaagctaaaagctgaaaaatcccctaaggctaaaataaatgaagctgtagaatgcttactgtccctgaaggctcagtataaagaaaaaactgggaaggagtacatacctggtcagcccccattatctcaaagttcggattcaagcccaaccagaaattctgaacctgctggtttagaaacaccagaagcgaaagtactttttgacaaagtagcttctcaaggggaagtagttcggaaacttaaaactgaaaaagcccctaaggatcaagtagatatagctgttcaagaactccttcagctaaaggcacagtacaagtctttgataggagtagagtataagcctgtgtcggccactggagctgaggacaaagataagaagaagaaagaaaaagaaaataaatctgaaaagcagaataagcctcagaaacaaaatgatggccaaaggaaagacccttctaaaaaccaaggaggtgggctctcatcaagtggagcaggagaagggcaggggcctaagaaacagaccaggttgggtcttgaggcaaaaaaagaagaaaatcttgctgattggtattctcaggtcatcacaaagtcagaaatgattgaataccatgacataagtggctgttatattcttcgtccctgggcctatgccatttgggaagccatcaaggacttttttgatgctgagatcaagaaacttggtgttgaaaactgctacttccccatgtttgtgtctcaaagtgcattagagaaagagaagactcatgttgctgactttgccccagaggttgcttgggttacaagatctggcaaaaccgagctggcagaaccaattgccattcgtcctactagtgaaacagtaatgtatcctgcatatgcaaaatgggtacagtcacacagagacctgcccatcaagctcaatcagtggtgcaatgtggtgcgttgggaattcaagcatcctcagcctttcctacgtactcgtgaatttctttggcaggaagggcacagtgcttttgctaccatggaagaggcagcggaagaggtcttgcagatacttgacttatatgctcaggtatatgaagaactcctggcaattcctgttgttaaaggaagaaagacggaaaaggaaaaatttgcaggaggagactatacaactacaatagaagcatttatatctgctagtggaagagctatccagggaggaacatcacatcatttagggcagaatttttccaaaatgtttgaaatcgtttttgaagatccaaagataccaggagagaagcaatttgcctatcaaaactcctggggcctgacaactcgaactattggtgttatgaccatggttcatggggacaacatgggtttagtattaccaccccgtgtagcatgtgttcaggtggtgattattccttgtggcattaccaatgcactttctgaagaagacaaagaagcgctgattgcaaaatgcaatgattatcgaaggcgattactcagtgttaacatccgcgttagagctgatttacgagataattattctccaggttggaaattcaatcactgggagctcaagggagttcccattagacttgaagttgggccacgtgatatgaagagctgtcagtttgtagccgtcagacgagatactggagaaaagctgacagttgctgaaaatgaggcagagactaaacttcaagctattttggaagacatccaggtcacccttttcacaagggcttctgaagaccttaagactcatatggttgtggctaatacaatggaagactttcagaagatactagattctggaaagattgttcagattccattctgtggggaaattgactgtgaggactggatcaaaaagaccactgccagggatcaagatcttgaacctggtgctccatccatgggagctaaaagcctttgcatccccttcaaaccactctgtgaactgcagcctggagccaaatgtgtctgtggcaagaaccctgccaagtactacaccttatttggtcgcagctactga

SEQ ID NO: 12 - DNA, 1539 bp, Artificial Sequence
  PRS domain _nucleotide sequence
ggagcaggagaagggcaggggcctaagaaacagaccaggttgggtcttgaggcaaaaaaagaagaaaatcttgctgattggtattctcaggtcatcacaaagtcagaaatgattgaataccatgacataagtggctgttatattcttcgtccctgggcctatgccatttgggaagccatcaaggacttttttgatgctgagatcaagaaacttggtgttgaaaactgctacttccccatgtttgtgtctcaaagtgcattagagaaagagaagactcatgttgctgactttgccccagaggttgcttgggttacaagatctggcaaaaccgagctggcagaaccaattgccattcgtcctactagtgaaacagtaatgtatcctgcatatgcaaaatgggtacagtcacacagagacctgcccatcaagctcaatcagtggtgcaatgtggtgcgttgggaattcaagcatcctcagcctttcctacgtactcgtgaatttctttggcaggaagggcacagtgcttttgctaccatggaagaggcagcggaagaggtcttgcagatacttgacttatatgctcaggtatatgaagaactcctggcaattcctgttgttaaaggaagaaagacggaaaaggaaaaatttgcaggaggagactatacaactacaatagaagcatttatatctgctagtggaagagctatccagggaggaacatcacatcatttagggcagaatttttccaaaatgtttgaaatcgtttttgaagatccaaagataccaggagagaagcaatttgcctatcaaaactcctggggcctgacaactcgaactattggtgttatgaccatggttcatggggacaacatgggtttagtattaccaccccgtgtagcatgtgttcaggtggtgattattccttgtggcattaccaatgcactttctgaagaagacaaagaagcgctgattgcaaaatgcaatgattatcgaaggcgattactcagtgttaacatccgcgttagagctgatttacgagataattattctccaggttggaaattcaatcactgggagctcaagggagttcccattagacttgaagttgggccacgtgatatgaagagctgtcagtttgtagccgtcagacgagatactggagaaaagctgacagttgctgaaaatgaggcagagactaaacttcaagctattttggaagacatccaggtcacccttttcacaagggcttctgaagaccttaagactcatatggttgtggctaatacaatggaagactttcagaagatactagattctggaaagattgttcagattccattctgtggggaaattgactgtgaggactggatcaaaaagaccactgccagggatcaagatcttgaacctggtgctccatccatgggagctaaaagcctttgcatccccttcaaaccactctgtgaactgcagcctggagccaaatgtgtctgtggcaagaaccctgccaagtactacaccttatttggtcgcagctactga

SEQ ID NO: 13 - DNA, 3699 bp, Artificial Sequence
  ERS-PRS domain _nucleotide sequence
atggcgacgctctctctgaccgtgaattcaggagaccctccgctaggagctttgctggcagtagaacacgtgaaagacgatgtcagcatttccgttgaagaagggaaagagaatattcttcatgtttctgaaaatgtgatattcacagatgtgaattctatacttcgctacttggctagagttgcaactacagctgggttatatggctctaatctgatggaacatactgagattgatcactggttggagttcagtgctacaaaattatcttcatgtgattcctttacttctacaattaatgaactcaatcattgcctgtctctgagaacatacttagttggaaactccttgagtttagcagatttatgtgtttgggccaccctaaaaggaaatgctgcctggcaagaacagttgaaacagaagaaagctccagttcatgtaaaacgttggtttggctttcttgaagcccagcaggccttccagtcagtaggtaccaagtgggatgtttcaacaaccaaagctcgagtggcacctgagaaaaagcaagatgttgggaaatttgttgagcttccaggtgcggagatgggaaaggttaccgtcagatttcctccagaggccagtggttacttacacattgggcatgcaaaagctgctcttctgaaccagcactaccaggttaactttaaagggaaactgatcatgagatttgatgacacaaatcctgaaaaagaaaaggaagattttgagaaggttatcttggaagatgttgcaatgttgcatatcaaaccagatcaatttacttatacttcggatcattttgaaactataatgaagtatgcagagaagctaattcaagaagggaaggcttatgtggatgatactcctgctgaacagatgaaagcagaacgtgagcagaggatagactctaaacatagaaaaaaccctattgagaagaatctacaaatgtgggaagaaatgaaaaaagggagccagtttggtcagtcctgttgtttgcgagcaaaaattgacatgagtagtaacaatggatgcatgagagatccaaccctttatcgctgcaaaattcaaccacatccaagaactggaaataaatacaatgtttatccaacatatgattttgcctgccccatagttgacagcatcgaaggtgttacacatgccctgagaacaacagaataccatgacagagatgagcagttttactggattattgaagctttaggcataagaaaaccatatatttgggaatatagtcggctaaatctcaacaacacagtgctatccaaaagaaaactcacatggtttgtcaatgaaggactagtagatggatgggatgacccaagatttcctacggttcgtggtgtactgagaagagggatgacagttgaaggactgaaacagtttattgctgctcagggctcctcacgttcagtcgtgaacatggagtgggacaaaatctgggcgtttaacaaaaaggttattgacccagtggctccacgatatgttgcattactgaagaaagaagtgatcccagtgaatgtacctgaagctcaggaggagatgaaagaagtagccaaacacccaaagaatcctgaggttggcttgaagcctgtgtggtatagtcccaaagttttcattgaaggtgctgatgcagagactttttcggagggtgagatggttacatttataaattggggcaacctcaacattacaaaaatacacaaaaatgcagatggaaaaatcatatctcttgatgcaaagttgaatttggaaaacaaagactacaagaaaaccactaaggtcacttggcttgcagagactacacatgctcttcctattccagtaatctgtgtcacttatgagcacttgatcacaaagccagtgctaggaaaagacgaggactttaagcagtatgtcaacaagaacagtaagcatgaagagctaatgctaggggatccctgccttaaggatttgaaaaaaggagatattatacaactccagagaagaggattcttcatatgtgatcaaccttatgaacctgttagcccatatagttgcaaggaagccccgtgtgttttgatatacattcctgatgggcacacaaaggaaatgccaacatcagggtcaaaggaaaagaccaaaggagcaggagaagggcaggggcctaagaaacagaccaggttgggtcttgaggcaaaaaaagaagaaaatcttgctgattggtattctcaggtcatcacaaagtcagaaatgattgaataccatgacataagtggctgttatattcttcgtccctgggcctatgccatttgggaagccatcaaggacttttttgatgctgagatcaagaaacttggtgttgaaaactgctacttccccatgtttgtgtctcaaagtgcattagagaaagagaagactcatgttgctgactttgccccagaggttgcttgggttacaagatctggcaaaaccgagctggcagaaccaattgccattcgtcctactagtgaaacagtaatgtatcctgcatatgcaaaatgggtacagtcacacagagacctgcccatcaagctcaatcagtggtgcaatgtggtgcgttgggaattcaagcatcctcagcctttcctacgtactcgtgaatttctttggcaggaagggcacagtgcttttgctaccatggaagaggcagcggaagaggtcttgcagatacttgacttatatgctcaggtatatgaagaactcctggcaattcctgttgttaaaggaagaaagacggaaaaggaaaaatttgcaggaggagactatacaactacaatagaagcatttatatctgctagtggaagagctatccagggaggaacatcacatcatttagggcagaatttttccaaaatgtttgaaatcgtttttgaagatccaaagataccaggagagaagcaatttgcctatcaaaactcctggggcctgacaactcgaactattggtgttatgaccatggttcatggggacaacatgggtttagtattaccaccccgtgtagcatgtgttcaggtggtgattattccttgtggcattaccaatgcactttctgaagaagacaaagaagcgctgattgcaaaatgcaatgattatcgaaggcgattactcagtgttaacatccgcgttagagctgatttacgagataattattctccaggttggaaattcaatcactgggagctcaagggagttcccattagacttgaagttgggccacgtgatatgaagagctgtcagtttgtagccgtcagacgagatactggagaaaagctgacagttgctgaaaatgaggcagagactaaacttcaagctattttggaagacatccaggtcacccttttcacaagggcttctgaagaccttaagactcatatggttgtggctaatacaatggaagactttcagaagatactagattctggaaagattgttcagattccattctgtggggaaattgactgtgaggactggatcaaaaagaccactgccagggatcaagatcttgaacctggtgctccatccatgggagctaaaagcctttgcatccccttcaaaccactctgtgaactgcagcctggagccaaatgtgtctgtggcaagaaccctgccaagtactacaccttatttggtcgcagctactga

SEQ ID NO: 14 - DNA, 840 bp, Artificial Sequence
  WHEP domain _nucleotide sequence
gtagaagccacaaaaaatgagacctctgctccttttaaggaaagaccaacaccttctctgaataataattgtactacatctgaggattccttggtcctttacaatagagtggctgttcaaggagatgtggttcgtgaattaaaagccaagaaagcaccaaaggaagatgtagatgcagctgtaaaacagcttttgtctttgaaagctgaatataaggagaaaactggccaggaatataaacctggaaaccctcctgctgaaataggacagaatatttcttctaattcctcagcaagtattctggaaagtaaatctctgtatgatgaagttgctgcacaaggggaggtggttcgtaagctaaaagctgaaaaatcccctaaggctaaaataaatgaagctgtagaatgcttactgtccctgaaggctcagtataaagaaaaaactgggaaggagtacatacctggtcagcccccattatctcaaagttcggattcaagcccaaccagaaattctgaacctgctggtttagaaacaccagaagcgaaagtactttttgacaaagtagcttctcaaggggaagtagttcggaaacttaaaactgaaaaagcccctaaggatcaagtagatatagctgttcaagaactccttcagctaaaggcacagtacaagtctttgataggagtagagtataagcctgtgtcggccactggagctgaggacaaagataagaagaagaaagaaaaagaaaataaatctgaaaagcagaataagcctcagaaacaaaatgatggccaaaggaaagacccttctaaaaaccaaggaggtgggctctcatcaagt

SEQ ID NO: 15 - protein, 264 aa, Artificial Sequence
  Wild type Snail1(whole amino acid sequence)_zinc finger protein SNAI1 [Homo sapiens](NCBI Reference Sequence: NP_005976.2)
MPRSFLVRKPSDPNRKPNYSELQDSNPEFTFQQPYDQAHLLAAIPPPEILNPTASLPMLIWDSVLAPQAQPIAWASLRLQESPRVAELTSLSDEDSGKGSQPPSPPSPAPSSFSSTSVSSLEAEAYAAFPGLGQVPKQLAQLSEAKDLQARKAFNCKYCNKEYLSLGALKMHIRSHTLPCVCGTCGKAFSRPWLLQGHVRTHTGEKPFSCPHCSRAFADRSNLRAHLQTHSDVKKYQCQACARTFSRMSLLHKHQESGCSGCPR

SEQ ID NO: 16 - DNA, 1722 bp, Artificial Sequence
  Wild type Snail1(whole nucleotide sequence)_Homo sapiens snail family zinc finger 1 (SNAI1), mRNA
attcattgcgccgcggcacggcctagcgagtggttcttctgcgctactgctgcgcgaatcggcgaccccagtgcctcgaccactatgccgcgctctttcctcgtcaggaagccctccgaccccaatcggaagcctaactacagcgagctgcaggactctaatccagagtttaccttccagcagccctacgaccaggcccacctgctggcagccatcccacctccggagatcctcaaccccaccgcctcgctgccaatgctcatctgggactctgtcctggcgccccaagcccagccaattgcctgggcctcccttcggctccaggagagtcccagggtggcagagctgacctccctgtcagatgaggacagtgggaaaggctcccagccccccagcccaccctcaccggctccttcgtccttctcctctacttcagtctcttccttggaggccgaggcctatgctgccttcccaggcttgggccaagtgcccaagcagctggcccagctctctgaggccaaggatctccaggctcgaaaggccttcaactgcaaatactgcaacaaggaatacctcagcctgggtgccctcaagatgcacatccgaagccacacgctgccctgcgtctgcggaacctgcgggaaggccttctctaggccctggctgctacaaggccatgtccggacccacactggcgagaagcccttctcctgtccccactgcagccgtgccttcgctgaccgctccaacctgcgggcccacctccagacccactcagatgtcaagaagtaccagtgccaggcgtgtgctcggaccttctcccgaatgtccctgctccacaagcaccaagagtccggctgctcaggatgtccccgctgaccctcgaggctccctcttcctctccatacctgcccctgcctgacagccttccccagctccagcaggaaggaccccacatccttctcactgccatggaattccctcctgagtgccccacttctggccacatcagccccacaggactttgatgaagaccattttctggttctgtgtcctctgcctgggctctggaagaggccttcccatggccatttctgtggagggagggcagctggcccccagccctgggggattcctgagctggcctgtctgcgtgggtttttgtatccagagctgtttggatacagctgctttgagctacaggacaaaggctgacagactcactgggaagctcccaccccactcaggggaccccactcccctcacacacacccccccacaaggaaccctcaggccaccctccacgaggtgtgactaactatgcaataatccacccccaggtgcagccccagggcctgcggaggcggtggcagactagagtctgagatgccccgagcccaggcagctatttcagcctcctgtttggtggggtggcacctgtttcccgggcaatttaacaatgtctgaaaagggactgtgagtaatggctgtcacttgtcgggggcccaagtggggtgctctggtctgaccgatgtgtctcccagaactattctgggggcccgacaggtgggcctgggaggaagatgtttacatttttaaaggtacactggtatttatatttcaaacattttgtatcaaggaaacgttttgtatagttatatgtacagtttattgatattcaataaagcagttaatttatatattaaaaaaaaaaaaaaaaaa

SEQ ID NO: 17 - DNA, 20 bp, Artificial Sequence
  Forward primer for EPRS
atccgcgttagagctgattt

SEQ ID NO: 18 - DNA, 20 bp, Artificial Sequence
  Reverse primer for EPRS
taatgggaactcccttgagc

SEQ ID NO: 19 - DNA, 20 bp, Artificial Sequence
  Forward primer for SNAIL1
cctccctgtcagatgaggac

SEQ ID NO: 20 - DNA, 20 bp, Artificial Sequence
  Reverse primer for SNAIL1
ccaggctgaggtattccttg

SEQ ID NO: 21 - DNA, 20 bp, Artificial Sequence
  Forward primer for GAPDH
caatgaccccttcattgacc

SEQ ID NO: 22 - DNA, 20 bp, Artificial Sequence
  Reverse primer for GAPDH
gacaagcttcccgttctcag

SEQ ID NO: 23 - DNA, 21 bp, Artificial Sequence
  siRNA Sense sequence for EPRS (si-EPRS)
cgaugucagcauuuccguutt

SEQ ID NO: 24 - DNA, 21 bp, Artificial Sequence
  siRNA Antisense sequence for EPRS (si-EPRS)
aacggaaaugcugacaucgtc

SEQ ID NO: 25 - protein, 1511 aa, Artificial Sequence [sequence omitted]

SEQ ID NO: 26 - protein, 1512 aa, Artificial Sequence [sequence omitted]

SEQ ID NO: 27 - protein, 1512 aa, Artificial Sequence
  EPRS XP_001172425.1
MATLSLTVNSGDPPLGALLAVEHVKDDVSISVEEGKENILHVSENVIFTDVNSILRYLARVATTAGLYGSNLMEHTEIDHWLEFSATKLSSCDSFTSAINELNHCLSLRTYLVGNSLSLADLCVWATLKGNAAWQEQLKQKKAPVHVKRWFGFLEAQQAFQSVGTKWDVSTTKARVAPEKKQDVGKFVELPGAEMGKVTVRFPPEASGYLHIGHAKAALLNQHYQVNFKGKLIMRFDDTNPEKEKEDFEKVILEDVAMLHIKPDQFTYTSDHFETIMKYAEKLIQEGKAYVDDTPAEQMKAEREQRIESKHRKNPIEKNLQMWEEMKKGSQFGQSCCLRAKIDMSSNNGCMRDPTLYRCKIQPHPRTGNKYNVYPTYDFACPIVDSIEGVTHALRTTEYHDRDEQFYWIIEALGIRKPYIWEYSRLNLNNTVLSKRKLTWFVNEGLVDGWDDPRFPTVRGVLRRGMTVEGLKQFIAAQGSSRSVVNMEWDKIWAFNKKVIDPVAPRYVALLKKEVIPVNVPEAQEEMKEVAKHPKNPEVGLKPVWYSPKVFIEGADAETFSEGEMVTFINWGNLNITKIHKNADGKIISLDAKLNLENKDYKKTTKITWLAETTHALPIPVICVTYEHLITKPVLGKDEDFKQYVNKNSKHEELMLGDPCLKDLKKGDIIQLQRRGFFICDQPYEPVSPYSCKEAPCVLIYIPDGHTKEMPTSGSKEKTKVEATKNETSAPFKERPTPSLNNNCTTSEDSLVLYNRVAVQGDVVRELKAKKAPKEDVDAAVKQLLSLKAEYKEKTGQEYKPGNPPAEIGQNISSNSSASILESKSLYDEVAAQGEVVRKLKAEKAPKAKINEAVECLLSLKAQYKEKTGKEYIPGQPPLSQSSDSSPTRNSEPAGLETPEAKVLFDKVASQGEVVRKLKTEKAPKDQVDIAVQELLQLKAQYKSLIGVEYKPVSATGAEDKDKKKKEKENKSEKQNKPQKQNDGQRKDPSKNQGGGLSSSGAGEGQGPKKQTRLGLEAKKEENLADWYSQVITKSEMIEYHDVSGCYILRPWAYAIWEAIKDFFDAEIKKLGVENCYFPMFVSQSALEKEKTHVADFAPEVAWVTRSGKTELAEPIAIRPTSETVMYPAYAKWVQSHRDLPIKLNQWCNVVRWEFKHPQPFLRTREFLWQEGHSAFATMEEAAEEVLQILDLYAQVYEELLAIPVVKGRKTEKEKFAGGDYTTTIEAFISASGRAIQGGTSHHLGQNFSKMFEIVFEDPKIPGEKQFAYQNSWGLTTRTIGVMTMVHGDNMGLVLPPRVACVQVVIIPCGITNALSEEDKEALIAKCNDYRRRLLRVNIRVRADLRDNYSPGWKFNHWELKGVPIRLEVGPRDMKSCQFVAVRRDTGEKLTVAENEAETKLQAILEDIQVTLFTRASEDLKTHMVVANTMEDFQKILDSGKIVQIPFCGEIDCEDWIKKTTARDQDLEPGAPSMGAKSLCIPFKPLCELQPGAKCVCGKNPAKYYTLFGRSY

SEQ ID NO: 28 - protein, 1512 aa, Artificial Sequence
  EPRS XP_003807230.1
MATLSLTVNSGDPPLGALLAVEHVKDDVSISVEEGKENILHVSENVIFTDVNSILRYLARVATTAGLYGSNLMEHTEIDHWLEFSATKLSSCDSFTSAINELNHCLSLRTYLVGNSLSLADLCVWATLKGNAAWQEQLKQKKAPVHVKRWFGFLEAQQAFQSVGTKWDVSTTKARVAPEKKQDVGKFVELPGAEMGKVTVRFPPEASGYLHIGHAKAALLNQHYQVNFKGKLIMRFDDTNPEKEKEDFEKVILEDVAMLHIKPDQFTYTSDHFETIMKYAEKLIQEGKAYVDDTPAEQMKAEREQRIESKHRKNPIEKNLQMWEEMKKGSQFGQSCCLRAKIDMSSNNGCMRDPTLYRCKIQPHPRTGNKYNVYPTYDFACPIVDSIEGVTHALRTTEYHDRDEQFYWIIEALGIRKPYIWEYSRLNLNNTVLSKRKLTWFVNEGLVDGWDDPRFPTVRGVLRRGMTVEGLKQFIAAQGSSRSVVNMEWDKIWAFNKKVIDPVAPRYVALLKKEVIPVNVPEAQEEMKEVAKHPKNPEVGLKPVWYSPKVFIEGADAETFSEGEMVTFINWGNLNITKIHKNADGKIISLDAKLNLENKDYKKTTKITWLAETTHALPIPVICVTYEHLITKPVLGKDEDFKQYVNKNSKHEELMLGDPCLKDLKKGDIIQLQRRGFFICDQPYEPVSPYSCKEAPCVLIYIPDGHTKEMPTSGSKEKTKVEATKNETSAPFKERPTPSLNNNCTTSEDSLVLYNRVAVQGDVVRELKAKKAPKEDVDAAVKQLLSLKAEYKEKTGQEYKPGNPPAEIGQNISSNSSASILESKSLYDEVAAQGEVVRKLKAEKAPKAKINEAVECLLSLKAQYKEKTGKEYVPGQPPLSQSSDSSPTRNSEPAGLETPEAKVLFDKVASQGEVVRKLKTEKAPKDQVDIAVQELLQLKAQYKSLIGVEYKPVSATGAEDKDKKKKEKENKSEKQNKPQKQNDGQRKDPSKNQGGGLSSSGAGEGQGPKKQTRLGLEAKKEENLADWYSQVITKSEMIEYHDVSGCYILRPWAYAIWEAIKDFFDAEIKKLGVENCYFPMFVSQSALEKEKTHVADFAPEVAWVTRSGKTELAEPIAIRPTSETVMYPAYAKWVQSHRDLPIKLNQWCNVVRWEFKHPQPFLRTREFLWQEGHSAFATMEEAAEEVLQILDLYAQVYEELLAIPVVKGRKTEKEKFAGGDYTTTIEAFISASGRAIQGGTSHHLGQNFSKMFEIVFEDPKIPGEKQFAYQNSWGLTTRTIGVMTMVHGDNMGLVLPPRVACVQVVIIPCGITNALSEEDKEALIAKCNDYRRRLLRVNIRVRADLRDNYSPGWKFNHWELKGVPIRLEVGPRDMKSCQFVAVRRDTGEKLTVAENEAETKLQAILEDIQVTLFTRASEDLKTHMVVANTMEDFQKILDSGKIVQIPFCGEIDCEDWIKKTTARDQDLEPGAPSMGAKSLCIPFKPLCELQPGAKCVCGKNPAKYYTLFGRSY

SEQ ID NO: 29 - protein, 1519 aa, Artificial Sequence
  EPRS XP_009439782.1
MATLSLTVNSGDPPLGALLAVEHVKDDVSISVEEGKENILHVSENVIFTDVNSILRYLARVATTAGLYGSNLMEHTEIDHWLEFSATKLSSCDSFTSAINELNHCLSLRTYLVGNSLSLADLCVWATLKGNAAWQEQLKQKKAPVHVKRWFGFLEAQQAFQSVGTKWDVSTTKARVAPEKKQDVGKFVELPGAEMGKVTVRFPPEASGYLHIGHAKAALLNQHYQVNFKGKLIMRFDDTNPEKEKEDFEKVILEDVAMLHIKPDQFTYTSDHFETIMKYAEKLIQEGKAYVDDTPAEQMKAEREQRIESKHRKNPIEKNLQMWEEMKKGSQFGQSCCLRAKIDMSSNNGCMRDPTLYRCKIQPHPRTGNKYNVYPTYDFACPIVDSIEGVTHALRTTEYHDRDEQFYWIIEALGIRKPYIWEYSRLNLNNTVLSKRKLTWFVNEGLVDGWDDPRFPTVRGVLRRGMTVEGLKQFIAAQGSSRSVVNMEWDKIWAFNKKLRALCKKVIDPVAPRYVALLKKEVIPVNVPEAQEEMKEVAKHPKNPEVGLKPVWYSPKVFIEGADAETFSEGEMVTFINWGNLNITKIHKNADGKIISLDAKLNLENKDYKKTTKITWLAETTHALPIPVICVTYEHLITKPVLGKDEDFKQYVNKNSKHEELMLGDPCLKDLKKGDIIQLQRRGFFICDQPYEPVSPYSCKEAPCVLIYIPDGHTKEMPTSGSKEKTKVEATKNETSAPFKERPTPSLNNNCTTSEDSLVLYNRVAVQGDVVRELKAKKAPKEDVDAAVKQLLSLKAEYKEKTGQEYKPGNPPAEIGQNISSNSSASILESKSLYDEVAAQGEVVRKLKAEKAPKAKINEAVECLLSLKAQYKEKTGKEYIPGQPPLSQSSDSSPTRNSEPAGLETPEAKVLFDKVASQGEVVRKLKTEKAPKDQVDIAVQELLQLKAQYKSLIGVEYKPVSATGAEDKDKKKKEKENKSEKQNKPQKQNDGQRKDPSKNQGGGLSSSGAGEGQGPKKQTRLGLEAKKEENLADWYSQVITKSEMIEYHDVSGCYILRPWAYAIWEAIKDFFDAEIKKLGVENCYFPMFVSQSALEKEKTHVADFAPEVAWVTRSGKTELAEPIAIRPTSETVMYPAYAKWVQSHRDLPIKLNQWCNVVRWEFKHPQPFLRTREFLWQEGHSAFATMEEAAEEVLQILDLYAQVYEELLAIPVVKGRKTEKEKFAGGDYTTTIEAFISASGRAIQGGTSHHLGQNFSKMFEIVFEDPKIPGEKQFAYQNSWGLTTRTIGVMTMVHGDNMGLVLPPRVACVQVVIIPCGITNALSEEDKEALIAKCNDYRRRLLRVNIRVRADLRDNYSPGWKFNHWELKGVPIRLEVGPRDMKSCQFVAVRRDTGEKLTVAENEAETKLQAILEDIQVTLFTRASEDLKTHMVVANTMEDFQKILDSGKIVQIPFCGEIDCEDWIKKTTARDQDLEPGAPSMGAKSLCIPFKPLCELQPGAKCVCGKNPAKYYTLFGRSY

SEQ ID NO: 30 - protein, 1512 aa, Artificial Sequence
  EPRS XP_003265132.1
MATLCLTVNSGDPPLGALLAVEHVKDDVSISVEEGKENILHVSENVIFTDVNSILRYLARVATTAGLYGSNLMEHTEIDHWLEFSATKLSSCDSFTSAINELNHCLSLRTYLVGNSLSLADLCVWATLKGNAAWQEQLKQKKAPVHVKRWFGFLEAQQAFQSVGTKWDVSTTKARVAPEKKQDVGKFVELPGAEMGKVTVRFPPEASGYLHIGHAKAALLNQHYQVNFKGKLIMRFDDTNPEKEKEDFEKVILEDVAMLHIKPDQFTYTSDHFETIMKYAEKLIQEGKAYVDDTPAEQMKAEREQRIESKHRKNSIEKNLQMWEEMKKGSQFGQSCCLRAKIDMSSNNGCMRDPTLYRCKIQPHPRTGNKYNVYPTYDFACPIVDSIEGVTHALRTTEYHDRDEQFYWIIEALGIRKPYIWEYSRLNLNNTVLSKRKLTWFVNEGLVDGWDDPRFPTVRGVLRRGMTVEGLKQFIAAQGSSRSVVNMEWDKIWAFNKKVIDPVAPRYVALLKKEVIPVNVPEAQEEMKEVAKHPKNPEVGLKPVWYSPKVFIEGADAETFSEGEMVTFINWGNLNITKIHKNADGKIVSLDAKLNLENKDYKKTTKITWLAETTHALPIPAICVTYEHLITKPVLGKDEDFKQYVNKNSKHEELMLGDPCLKDLKKGDIIQLQRRGFFICDQPYEPVSPYSCKEAPCVLIYIPDGHTKEMPTSGSKEKTKVEATKNETSAPFKERPTPSLNNNCTTSEDSFVLYNRVAAQGDVVRELKAKKAPKEDIDAAVKQLLSLKAEYKEKTGQEYKPGNPPAEIGQNISSNSSASILESKSLYDEVAAQGEVVRKLKAEKAPKAKINEAVECLLSLKAQYKEKTGKEYIPGQPPLSQSSDSSPTRNSEPAGLETPEAKVLFDKVASQGEVVRKLKTEKAPKDQVDIAVQELLQLKAQYKSLIGVEYKPVSATGAEDKDKKKKEKENKSEKQNKPQKQNDAQRKDPSKNQGGGLSSSGAGEGQGPKKQTRLGLEAKKEENLADWYSQVITKSEMIEYHDVSGCYILRPWAYAIWEAIKDFFDAEIKKLGVENCYFPMFVSQNALEKEKTHIADFAPEVAWVTRSGKTELAEPIAIRPTSETVMYPAYAKWVQSHRDLPIKLNQWCNVVRWEFKHPQPFLRTREFLWQEGHSAFATMEEAAEEVLQILDLYAQVYEELLAIPVVKGRKTEKEKFAGGDYTTTIEAFISASGRAIQGGTSHHLGQNFSKMFEIVFEDPKTPGEKQFAYQNSWGLTTRTIGVMTMVHGDNMGLVLPPRVACVQVVIIPCGITNALSEEDKEALIAKCNDYRRRLLSVNIRVRADLRDNYSPGWKFNHWELKGVPIRLEVGPRDMKSCQFVAVRRDTGEKLTVVENEAETKLQAILEDIQVTLFTRASEDLKTHMVVANTMEDFQKILDSGKIVQIPFCGEIDCEDWIKKTTARDQDLEPGAPSMGAKSLCIPFKPLCELQPGAKCVCGKNPAKYYTLFGRSY

SEQ ID NO: 31 - protein, 1522 aa, Artificial Sequence [sequence omitted]

SEQ ID NO: 32 - protein, 1440 aa, Artificial Sequence
  EPRS CAA38224.1
MEHTEIDHWLEFSATKLSSCDSFTSTINELNHCLSLRTYLVGNSLSLADLCVWATLKGNAAWQEQLKQKKAPVHVKRWFGFLEAQQAFQSVGTKWDVSTTKARVAPEKKQDVGKFVELPGAEMGKVTVRFPPEASGYLHIGHAKAALLNQHYQVNFKGKLIMRFDDTNPEKEKEDFEKVILEDVAMLHIKPDQFTYTSDHFETIMKYAEKLIQEGKAYVDDTPAEQMKAEREQRIESKHRKNPIEKNLQMWEEMKKGSQFGHSCCLRAKIDMSSNNGCMRDPTLYRCKIQPHPRTGNKYNVYPTYDFACPIVDSIEGVTHALRTTEYHDRDEQFYWIIEALGIRKPYIWEYSRLNLNNTVLSKRKLTWFVNEGLVDGWDDPRFPTVRGVLRRGMTVEGLKQFIAAQGSSRSVVNMEWDKIWAFNKKVIDPVAPRYVALLKKEVIPVNVPEAQEEMKEVAKHPKNPEVGLKPVWYSPKVFIEGADAETFSEGEMVTFINWGNLNITKIHKNADGKIISLDAKFNLENKDYKKTTKVTWLAETTHALPIPVICVTYEHLITKPVLGKDEDFKQYVNKNSKHEELMLGDPCLKDLKKGDIIQLQRRGFFICDQPYEPVSPYSCKEAPCVLIYIPDGHTKEMPTSGSKEKTKVEATKNETSAPFKERPTPSLNNNCTTSEDSLVLYNRVAVQGDVVRELKAKKAPKEDVDAAVKQLLSLKAEYKEKTGQEYKPGNPPAEIGQNISSNSSASILESKSLYDEVAAQGEVVRKLKAEKSPKAKINEAVECLLSLKAQYKEKTGKEYIPGQPPLSQSSDSSPTRNSEPAGLETPEAKVLFDKVASQGEVVRKLKTEKAPKDQVDIAVQELLQLKAQYKSLIGVEYKPVSATGAEDKDKKKKEKENKSEKQNKPQKQNDGQRKDPSKNQGGGLSSSGAGEGQGPKKQTRLGLEAKKEENLADWYSQVITKSEMIEYHDISGCYILRPWAYAIWEAIKDFFDAEIKKLGVENCYFPMFVSQSALEKEKTHVADFAPEVAWVTRSGKTELAEPIAIRPTSETVMYPAYAKWVQSHRDLPIKLNQWCNVVRWEFKHPQPFLRTREFLWQEGHSAFATMEEAAEEVLQILDLYAQVYEELLAIPVVKGRKTEKEKFAGGDYTTTIEAFISASGRAIQGGTSHHLGQNFSKMFEIVFEDPKIPGEKQFAYQNSWGLTTRTIGVMTMVHGDNMGLVLPPRVACVQVVIIPCGITNALSEEDKEALIAKCNDYRRRLLSVNIRVRADLRDNYSPGWKFNHWELKGVPIRLEVGPRDMKSCQFVAVRRDTGEKLTVAENEAETKLQAILEDIQVTLFTRASEDLKTHMVVANTMEDFQKILDSGKIVQIPFCGEIDCEDWIKKTTARDQDLEPGAPSMGAKSLCIPFKPLCELQPGAKCVCGKNPAKYYTLFGRSY

SEQ ID NO: 33 - protein, 1511 aa, Artificial Sequence
  EPRS XP_010366377.1
MATLCLTVNSGDPPLGALLAVEHVKDDVSISIEEGKENILRVSENVIFTDVNSILRYLARVATTAGLYGCNLMEHTEIDHWLEFSATKLSSCDSFTSAINELNHCLSLRTYLVGNSLSLADLCVWATLKGNASWQEQLKQNKAPVHVKRWFGFLEAQQAFQSVGTKWDVSTTKARVAPEKKQDVGKFVELPGAEMGKVTVRFPPEASGYLHIGHAKAALLNQHYQVNFKGKLIMRFDDTNPEKEKEDFEKVILEDVAMLHIKPDQFTYTSDHFETIMKYAEKLIQEGKAYVDDTPAEQMKAEREQRIESKHRKNPIEKNLQMWEEMKKGSQFGQSCCLRAKIDMSSNNGCMRDPTLYRCKIQPHPRTGNKYNVYPTYDFACPIVDSIEGVTHALRTTEYHDRDEQFYWIIEALGIRKPYIWEYSRLNLNNTVLSKRKLTWFVNEGLVDGWDDPRFPTVRGVLRRGMTVEGLKQFIAAQGSSRSVVNMEWDKIWSFNKKVIDPVAPRYVALLKKEVIPVNVPEAQEEMKEVAKHPKNPEVGLKPVWYSPKVFVEGADAETFSEGEMVTFINWGNLNITKIHKNTDGKIISLDAKLNLENKDYKKTTKITWLAETTHALPVPAICVTYEHLITKPVLGKDEDFKQYVNKNSKHEELMLGDPCLKDLKKGDIIQLQRRGFFICDQPYEPVSPYSCKEAPCVLIYIPDGHTKEMPTSGSKEKTKVEATKNETSAPFKERPTPSLNNCTTSEDSLVLYNRVAVQGDVVRELKAKKAPKEDIDAAVKQLLSLKAEYKEKTGQEYKPGNPPAEIGQNISSNSSASILESKSLYDQVAAQGEVVRKLKAEKAPKAKINEAVECLLSLKAQYKEKTGKEYIPGQPPLSQSSDSSPTRNSEPAGLETPEAKLLFDKVASQGEVVRKLKTEKAPKDQVDIAVQELLQLKAQYKSLIGVEYKPVSATGAEDKDKKKKEKENKSEKQNKPQKQNDGQRKDPSKNQGGGLSSSGAGEGQGPKKQTRLGLEAKKEENLADWYSQVITKSEMIEYHDVSGCYILRPWAYAIWEAIKDFFDAGIKKLGVENCYFPMFVSQGALEKEKTHIADFAPEVAWVTRSGKTELAEPIAIRPTSETVMYPAYAKWVQSHRDLPIKLNQWCNVVRWEFKHPQPFLRTREFLWQEGHSAFATMEEAAEEVLQILDLYAQVYEELLAIPVVRGRKTEKEKFAGGDYTTTVEAFISASGRAIQGGTSHHLGQNFSKMFEIVFEDPKTPGEKQFAYQNSWGLTTRTIGVMTMVHGDNMGLVLPPRVACVQVVIIPCGITNALSEEDKEALIAKCNDYRRRLLSVNIRVRADLRDNYSPGWKFNHWELKGVPIRLEVGPRDMKSCQFVAVRRDTGEKLTVAENEAETKLQAILEDIHVTLFTRASEDLKTHMVVANTMEDFQKILDSGKIVQIPFCGEIDCEDWIKKTTARDQDLEPGAPSMGAKSLCIPFKPLCELQPGAKCVCGKNPAKFYTLFGRSY

SEQ ID NO: 34 - protein, 1512 aa, Artificial Sequence
  EPRS XP_005540939.1
MATLCLTVNSGDPPLGALLAVEHVKDDVSISIEEGKENILRVSENVIFTDVNSILRYLARVATTAGLYGCNLMEHTEIDHWLEFSATKLSSCDSFTSAINELNHCLSLRTYLVGNSLSLADLCVWATLKGNAAWQEQLKQNKAPVHVKRWFGFLEAQQTFQSVGTKWDVSTTKARVVPEKKQDVGKFVELPGAEMGKVTVRFPPEASGYLHIGHAKAALLNQHYQVNFKGKLIMRFDDTNPEKEKEDFEKVILEDVAMLHIKPDQFTYTSDHFETIMKYAEKLIQEGKAYVDDTPAEQMKAEREQRIESKHRKNPIEKNLQMWEEMKKGSQFGQSCCLRAKIDMSSNNGCMRDPTLYRCKIQPHPRTGNKYNVYPTYDFACPIVDSIEGVTHALRTTEYHDRDEQFYWIIEALGIRKPYIWEYSRLNLNNTVLSKRKLTWFVNEGLVDGWDDPRFPTVRGVLRRGMTVEGLKQFIAAQGSSRSVVNMEWDKIWAFNKKVIDPVAPRYVALLKKEVIPVNVPEAQEEMKEVAKHPKNPEVGLKPVWYSPKVFVEGADAETFSEGEMVTFINWGNLNITKIHKNTDGKIISLDAKLNLENKDYKKTTKITWLAETTHAPPVPAICVTYEHLITKPVLGKDEDFKQYVNKNSKHEELMLGDPCLKDLKKGDIIQLQRRGFFICDQPYEPVSPYSCKEAPCVLIYIPDGHTKEMPTSGSKEKTKVEATKNETSAPFKERPTPSLNNNCTTSEDSLVLYNRVAVQGDVVRELKAKKAPKEDIDAAVKQLLSLKAEYKEKTGQEYKPGNPPAEIGQNISSNSSASILESKSLYDQVAAQGEVVRKLKAEKAPKAKINEAVECLLSLKAQYKEKTGKEYIPGQPPLSQSSDSSPTRNSEPAGLETPEAKLLFDKVASQGEVVRKLKTEKAPKDQVDIAVQELLQLKAQYKSLIGVEYKPVSATGAEDKDKKKKEKENKSEKQNKPQKQNDGQRKDPSKNQGGGLSSSGAGEGQGPKKQTRLGLEAKKEENLADWYSQVITKSEMIEYHDVSGCYILRPWAYAIWEAIKDFFDAGIKKLGVENCYFPMFVSQGALEKEKTHIADFAPEVAWVTRSGKTELAEPIAIRPTSETVMYPAYAKWVQSHRDLPIKLNQWCNVVRWEFKHPQPFLRTREFLWQEGHSAFATMEEAAEEVLQILDLYAQVYEELLAIPVVRGRKTEKEKFAGGDYTTTVEAFISASGRAIQGGTSHHLGQNFSKMFEIVFEDPKTPGEKQFAYQNSWGLTTRTIGVMTMVHGDNMGLVLPPRVACVQVVIIPCGITNALSEEDKEALIAKCNDYRRRLLNVNIRVRADLRDNYSPGWKFNHWELKGVPIRLEVGPRDMKSCQFVAVRRDTGEKLTVAENEAETKLQAILEDIHVTLFTRASEDLKTHMVVANTMEDFQKILDSGKIVQIPFCGEIDCEDWIKKTTARDQDLEPGAPSMGAKSLCIPFKPLCELQPGAKCVCGKNPAKFYTLFGRSY

SEQ ID NO: 35 - protein, 1512 aa, Artificial Sequence
  EPRS XP_007986597.1
MATLCLTVNSGDPPLGALLAVEHVKDDVSISIEEGKENILHVSENVIFTDVNSILRYLARVATTPGLYGCNLMEHTEIDHWLEFSATKLSSCDSFTSAINELNHCLSLRTYLVGNSLSLADLCVWATLKGNAAWQEQLKQNKAPVHVKRWFGFLEAQQTFQSVGTKWDVSTTKARVAPEKKQDVGKFVELPGAEMGKVTVRFPPEASGYLHIGHAKAALLNQHYQVNFKGKLIMRFDDTNPEKEKEDFEKVILEDVAMLHIKPDQFTYTSDHFETIMKYAEKLIQEGKAYVDDTPAEQMKAEREQRIESKHRKNPIEKNLQMWEEMKKGSQFGQSCCLRAKIDMSSNNGCMRDPTLYRCKIQPHPRTGNKYNVYPTYDFACPIVDSIEGVTHALRTTEYHDRDEQFYWIIEALGIRKPYIWEYSRLNLNNTVLSKRKLTWFVNEGLVDGWDDPRFPTVRGVLRRGMTVEGLKQFIAAQGSSRSVVNMEWDKIWAFNKKVIDPVAPRYVALLKKEVIPVNVPEAQEEMKEVAKHPKNPEVGLKPVWYSPKVFVEGADAETFSEGEMVTFINWGNLNITKIHKNTDGKIISLDAKLNLENKDYKKTTKITWLAETTHALPVPAICVTYEHLITKPVLGKDEDFKQYVNKNSKHEELMLGDPCLKDLKKGDIIQLQRRGFFICDQPYEPVSPYSCKEAPCVLIYIPDGHTKEMPTSGSKEKTKVEATKNETSAAFKERPTPSLNNNCTTSEDSLVLYNRVAVQGDVVRELKAKKAPKEDIDAAVKQLLSLKAEYKEKTGQEYKPGNPPAEIGQNISSNSSASILESRSLYDQVAAQGEVVRKLKAEKAPKAKINEAVECLLSLKAQYKEKTGKEYIPGQPPLSQSSDSSPNRNSEPAGLETPEAKLLFDKVASQGEVVRKLKTEKAPKDQVDIAVQELLQLKAQYKSLIGVEYKPVSATGAEDKDKKKKEKENKSEKQNKPQKQNDSQRKDPSKNQGGGLSSSGAGEGQGPKKQTRLGLEAKKEENLADWYSQVITKSEMIEYHDVSGCYILRPWAYAIWEAIKDFFDAGIKKLGVENCYFPMFVSQGALEKEKTHIADFAPEVAWVTRSGKTELAEPIAIRPTSETVMYPAYAKWVQSHRDLPIKLNQWCNVVRWEFKHPQPFLRTREFLWQEGHSAFATMEEAAEEVLQILDLYAQVYEELLAIPVVRGRKTEKEKFAGGDYTTTIEAFISASGRAIQGGTSHHLGQNFSKMFEIVFEDPKTPGEKQFAYQNSWGLTTRTIGVMTMVHGDNMGLVLPPRVACVQVVIIPCGITNALSEEDKEALIAKCNDYRRRLLNVNIRVRADLRDNYSPGWKFNHWELKGVPIRLEVGPRDMKSCQFVAVRRDTGEKLTVAENEAETKLQAILEDIHVTLFTRASEDLKTHMVVANTMEDFQKILDSGKIAQIPFCGEIDCEDWIKKTTARDQDLEPGAPSMGAKSLCIPFKPLCELQPGAKCVCGKNPAKYYTLFGRSY

SEQ ID NO: 36 - protein, 1519 aa, Artificial Sequence
  EPRS XP_005540938.1
MATLCLTVNSGDPPLGALLAVEHVKDDVSISIEEGKENILRVSENVIFTDVNSILRYLARVATTAGLYGCNLMEHTEIDHWLEFSATKLSSCDSFTSAINELNHCLSLRTYLVGNSLSLADLCVWATLKGNAAWQEQLKQNKAPVHVKRWFGFLEAQQTFQSVGTKWDVSTTKARVVPEKKQDVGKFVELPGAEMGKVTVRFPPEASGYLHIGHAKAALLNQHYQVNFKGKLIMRFDDTNPEKEKEDFEKVILEDVAMLHIKPDQFTYTSDHFETIMKYAEKLIQEGKAYVDDTPAEQMKAEREQRIESKHRKNPIEKNLQMWEEMKKGSQFGQSCCLRAKIDMSSNNGCMRDPTLYRCKIQPHPRTGNKYNVYPTYDFACPIVDSIEGVTHALRTTEYHDRDEQFYWIIEALGIRKPYIWEYSRLNLNNTVLSKRKLTWFVNEGLVDGWDDPRFPTVRGVLRRGMTVEGLKQFIAAQGSSRSVVNMEWDKIWAFNKKLRALCKKVIDPVAPRYVALLKKEVIPVNVPEAQEEMKEVAKHPKNPEVGLKPVWYSPKVFVEGADAETFSEGEMVTFINWGNLNITKIHKNTDGKIISLDAKLNLENKDYKKTTKITWLAETTHAPPVPAICVTYEHLITKPVLGKDEDFKQYVNKNSKHEELMLGDPCLKDLKKGDIIQLQRRGFFICDQPYEPVSPYSCKEAPCVLIYIPDGHTKEMPTSGSKEKTKVEATKNETSAPFKERPTPSLNNNCTTSEDSLVLYNRVAVQGDVVRELKAKKAPKEDIDAAVKQLLSLKAEYKEKTGQEYKPGNPPAEIGQNISSNSSASILESKSLYDQVAAQGEVVRKLKAEKAPKAKINEAVECLLSLKAQYKEKTGKEYIPGQPPLSQSSDSSPTRNSEPAGLETPEAKLLFDKVASQGEVVRKLKTEKAPKDQVDIAVQELLQLKAQYKSLIGVEYKPVSATGAEDKDKKKKEKENKSEKQNKPQKQNDGQRKDPSKNQGGGLSSSGAGEGQGPKKQTRLGLEAKKEENLADWYSQVITKSEMIEYHDVSGCYILRPWAYAIWEAIKDFFDAGIKKLGVENCYFPMFVSQGALEKEKTHIADFAPEVAWVTRSGKTELAEPIAIRPTSETVMYPAYAKWVQSHRDLPIKLNQWCNVVRWEFKHPQPFLRTREFLWQEGHSAFATMEEAAEEVLQILDLYAQVYEELLAIPVVRGRKTEKEKFAGGDYTTTVEAFISASGRAIQGGTSHHLGQNFSKMFEIVFEDPKTPGEKQFAYQNSWGLTTRTIGVMTMVHGDNMGLVLPPRVACVQVVIIPCGITNALSEEDKEALIAKCNDYRRRLLNVNIRVRADLRDNYSPGWKFNHWELKGVPIRLEVGPRDMKSCQFVAVRRDTGEKLTVAENEAETKLQAILEDIHVTLFTRASEDLKTHMVVANTMEDFQKILDSGKIVQIPFCGEIDCEDWIKKTTARDQDLEPGAPSMGAKSLCIPFKPLCELQPGAKCVCGKNPAKFYTLFGRSY

SEQ ID NO: 37 - protein, 1519 aa, Artificial Sequence
  EPRS XP_007986596.1
MATLCLTVNSGDPPLGALLAVEHVKDDVSISIEEGKENILHVSENVIFTDVNSILRYLARVATTPGLYGCNLMEHTEIDHWLEFSATKLSSCDSFTSAINELNHCLSLRTYLVGNSLSLADLCVWATLKGNAAWQEQLKQNKAPVHVKRWFGFLEAQQTFQSVGTKWDVSTTKARVAPEKKQDVGKFVELPGAEMGKVTVRFPPEASGYLHIGHAKAALLNQHYQVNFKGKLIMRFDDTNPEKEKEDFEKVILEDVAMLHIKPDQFTYTSDHFETIMKYAEKLIQEGKAYVDDTPAEQMKAEREQRIESKHRKNPIEKNLQMWEEMKKGSQFGQSCCLRAKIDMSSNNGCMRDPTLYRCKIQPHPRTGNKYNVYPTYDFACPIVDSIEGVTHALRTTEYHDRDEQFYWIIEALGIRKPYIWEYSRLNLNNTVLSKRKLTWFVNEGLVDGWDDPRFPTVRGVLRRGMTVEGLKQFIAAQGSSRSVVNMEWDKIWAFNKKLRALCKKVIDPVAPRYVALLKKEVIPVNVPEAQEEMKEVAKHPKNPEVGLKPVWYSPKVFVEGADAETFSEGEMVTFINWGNLNITKIHKNTDGKIISLDAKLNLENKDYKKTTKITWLAETTHALPVPAICVTYEHLITKPVLGKDEDFKQYVNKNSKHEELMLGDPCLKDLKKGDIIQLQRRGFFICDQPYEPVSPYSCKEAPCVLIYIPDGHTKEMPTSGSKEKTKVEATKNETSAAFKERPTPSLNNNCTTSEDSLVLYNRVAVQGDVVRELKAKKAPKEDIDAAVKQLLSLKAEYKEKTGQEYKPGNPPAEIGQNISSNSSASILESRSLYDQVAAQGEVVRKLKAEKAPKAKINEAVECLLSLKAQYKEKTGKEYIPGQPPLSQSSDSSPNRNSEPAGLETPEAKLLFDKVASQGEVVRKLKTEKAPKDQVDIAVQELLQLKAQYKSLIGVEYKPVSATGAEDKDKKKKEKENKSEKQNKPQKQNDSQRKDPSKNQGGGLSSSGAGEGQGPKKQTRLGLEAKKEENLADWYSQVITKSEMIEYHDVSGCYILRPWAYAIWEAIKDFFDAGIKKLGVENCYFPMFVSQGALEKEKTHIADFAPEVAWVTRSGKTELAEPIAIRPTSETVMYPAYAKWVQSHRDLPIKLNQWCNVVRWEFKHPQPFLRTREFLWQEGHSAFATMEEAAEEVLQILDLYAQVYEELLAIPVVRGRKTEKEKFAGGDYTTTIEAFISASGRAIQGGTSHHLGQNFSKMFEIVFEDPKTPGEKQFAYQNSWGLTTRTIGVMTMVHGDNMGLVLPPRVACVQVVIIPCGITNALSEEDKEALIAKCNDYRRRLLNVNIRVRADLRDNYSPGWKFNHWELKGVPIRLEVGPRDMKSCQFVAVRRDTGEKLTVAENEAETKLQAILEDIHVTLFTRASEDLKTHMVVANTMEDFQKILDSGKIAQIPFCGEIDCEDWIKKTTARDQDLEPGAPSMGAKSLCIPFKPLCELQPGAKCVCGKNPAKYYTLFGRSY

SEQ ID NO: 38 - protein, 1447 aa, Artificial Sequence
  EPRS XP_007986598.1
MEHTEIDHWLEFSATKLSSCDSFTSAINELNHCLSLRTYLVGNSLSLADLCVWATLKGNAAWQEQLKQNKAPVHVKRWFGFLEAQQTFQSVGTKWDVSTTKARVAPEKKQDVGKFVELPGAEMGKVTVRFPPEASGYLHIGHAKAALLNQHYQVNFKGKLIMRFDDTNPEKEKEDFEKVILEDVAMLHIKPDQFTYTSDHFETIMKYAEKLIQEGKAYVDDTPAEQMKAEREQRIESKHRKNPIEKNLQMWEEMKKGSQFGQSCCLRAKIDMSSNNGCMRDPTLYRCKIQPHPRTGNKYNVYPTYDFACPIVDSIEGVTHALRTTEYHDRDEQFYWIIEALGIRKPYIWEYSRLNLNNTVLSKRKLTWFVNEGLVDGWDDPRFPTVRGVLRRGMTVEGLKQFIAAQGSSRSVVNMEWDKIWAFNKKLRALCKKVIDPVAPRYVALLKKEVIPVNVPEAQEEMKEVAKHPKNPEVGLKPVWYSPKVFVEGADAETFSEGEMVTFINWGNLNITKIHKNTDGKIISLDAKLNLENKDYKKTTKITWLAETTHALPVPAICVTYEHLITKPVLGKDEDFKQYVNKNSKHEELMLGDPCLKDLKKGDIIQLQRRGFFICDQPYEPVSPYSCKEAPCVLIYIPDGHTKEMPTSGSKEKTKVEATKNETSAAFKERPTPSLNNNCTTSEDSLVLYNRVAVQGDVVRELKAKKAPKEDIDAAVKQLLSLKAEYKEKTGQEYKPGNPPAEIGQNISSNSSASILESRSLYDQVAAQGEVVRKLKAEKAPKAKINEAVECLLSLKAQYKEKTGKEYIPGQPPLSQSSDSSPNRNSEPAGLETPEAKLLFDKVASQGEVVRKLKTEKAPKDQVDIAVQELLQLKAQYKSLIGVEYKPVSATGAEDKDKKKKEKENKSEKQNKPQKQNDSQRKDPSKNQGGGLSSSGAGEGQGPKKQTRLGLEAKKEENLADWYSQVITKSEMIEYHDVSGCYILRPWAYAIWEAIKDFFDAGIKKLGVENCYFPMFVSQGALEKEKTHIADFAPEVAWVTRSGKTELAEPIAIRPTSETVMYPAYAKWVQSHRDLPIKLNQWCNVVRWEFKHPQPFLRTREFLWQEGHSAFATMEEAAEEVLQILDLYAQVYEELLAIPVVRGRKTEKEKFAGGDYTTTIEAFISASGRAIQGGTSHHLGQNFSKMFEIVFEDPKTPGEKQFAYQNSWGLTTRTIGVMTMVHGDNMGLVLPPRVACVQVVIIPCGITNALSEEDKEALIAKCNDYRRRLLNVNIRVRADLRDNYSPGWKFNHWELKGVPIRLEVGPRDMKSCQFVAVRRDTGEKLTVAENEAETKLQAILEDIHVTLFTRASEDLKTHMVVANTMEDFQKILDSGKIAQIPFCGEIDCEDWIKKTTARDQDLEPGAPSMGAKSLCIPFKPLCELQPGAKCVCGKNPAKYYTLFGRSY

SEQ ID NO: 39 - protein, 1512 aa, Artificial Sequence
  EPRS XP_003930387.1
MATLCLTVNSGDPPLGALLAVEHVKDDVSISVEEGKENILRVSENVIFTDVNSILRYLARVATTAGLYGSNLMEHTEIDHWLEFSATKLSSCNSFASAINELNHCLSLRTYLVGNSLSLADLCVWATLKGNAAWQEQLKQNKAPVHVKRWFGFLEAQQAFQSVGTQWDVSTTKARVAPEKKQDVGKFVELPGAEMGKVTVRFPPEASGYLHIGHAKAALLNQHYQVNFKGKLIMRFDDTNPEKEKEDFEKVILEDVAMLHIKPDQFTYTSDHFETIMKYAEKLIQEGKAYVDDTPAEQMKAEREQRIESKHRKNPIEKNLQMWEEMKKGSQFGQSCCLRAKIDMSSNNGCMRDPTLYRCKIQPHPRTGNKYNVYPTYDFACPIVDSIEGVTHALRTTEYHDRDEQFYWIIEALGIRKPYIWEYSRLNLNNTVLSKRKLTWFVNEGLVDGWDDPRFPTVRGVLRRGMTVEGLKQFIAAQGSSRSVVNMEWDKIWAFNKKVIDPVAPRYVALLKKEVIPVNVPEAQEEMKEVAKHPKNPDVGLKPVWYSPKVFVEGADAETFSEGEMVTFINWGNLNITKIHKNADGKIISLDAKLNLENKDYKKTTKITWLAETTHALPIPAICVTYEHLITKPVLGKDEDFKQYVNKNSKHEELMLGDPCLKDLKKGDIIQLQRRGFFICDQPYEPVSPYSCKEAPCVLIYIPDGHTKEMPTSGSKEKTKVEATKNETSAPFKEKPTPSLNNTCTTSEDSLVLYNRVAVQGDVVRELKAKKAPKEDIDAAVKQLLSLKAEYKEKTGQEYKPGNPPAEIGQNMSSNSSTSILESKSLYDEVAAQGEVVRKLKAEKALKAKINEAVECLLSLKAQYKEKTGKEYIPGQPPLSQSSDSSPARNSEPAGLETPEAKVLFDKVAAQGDVVRKLKTEKASKDQIDTAVQELLQLKAQYKSLTGIEYKPVSATGAEDKDKKKKEKENKSEKQNKPQKQNDGQRKDPSKNQGGGLSSSGAGEGQGPKKQTRLGLEAKKEENLADWYSQVITKAEMIEYHDVSGCYILRPWAYAIWEAIKDFFDAEIKKLGVENCYFPMFVSQGALEKEKTHVADFAPEVAWVTRSGKTELAEPIAIRPTSETVMYPAYAKWVQSHRDLPIRLNQWCNVVRWEFKHPQPFLRTREFLWQEGHSAFATIEEAAEEVLQILDLYAQVYEELLAIPVVKGRKTEKEKFAGGDYTTTVEAFISASGRAIQGGTSHHLGQNFSKMFEITFEDPKMPGEKQFAYQNSWGLTTRTIGVMTMIHGDNMGLVLPPRVACVQVVVIPCGITNALSEEDKEALMAKCNDYRRRLLSVNIRVRADLRDNYSPGWKFNHWELKGVPIRLEVGPRDMKNCQFVAVRRDTGEKLTVAENEAETKLQAILEDIHVTLFTRASEDLKTHMVVANTMEDFQKILDSGKIVQIPFCGEIDCEDWIKKTTARDQDLEPGAPSMGAKSLCIPFKPLCELQPGAKCVCGKNPAKYYTLFGRSY

SEQ ID NO: 40 - protein, 1519 aa, Artificial Sequence
  EPRS XP_010339237.1
MATLCLTVNSGDPPLGALLAVEHVKDDVSISVEEGKENILRVSENVIFTDVNSILRYLARVATTAGLYGSNLMEHTEIDHWLEFSATKLSSCNSFASAINELNHCLSLRTYLVGNSLSLADLCVWATLKGNAAWQEQLKQNKAPVHVKRWFGFLEAQQAFQSVGTQWDVSTTKARVAPEKKQDVGKFVELPGAEMGKVTVRFPPEASGYLHIGHAKAALLNQHYQVNFKGKLIMRFDDTNPEKEKEDFEKVILEDVAMLHIKPDQFTYTSDHFETIMKYAEKLIQEGKAYVDDTPAEQMKAEREQRIESKHRKNPIEKNLQMWEEMKKGSQFGQSCCLRAKIDMSSNNGCMRDPTLYRCKIQPHPRTGNKYNVYPTYDFACPIVDSIEGVTHALRTTEYHDRDEQFYWIIEALGIRKPYIWEYSRLNLNNTVLSKRKLTWFVNEGLVDGWDDPRFPTVRGVLRRGMTVEGLKQFIAAQGSSRSVVNMEWDKIWAFNKKLRALCKKVIDPVAPRYVALLKKEVIPVNVPEAQEEMKEVAKHPKNPDVGLKPVWYSPKVFVEGADAETFSEGEMVTFINWGNLNITKIHKNADGKIISLDAKLNLENKDYKKTTKITWLAETTHALPIPAICVTYEHLITKPVLGKDEDFKQYVNKNSKHEELMLGDPCLKDLKKGDIIQLQRRGFFICDQPYEPVSPYSCKEAPCVLIYIPDGHTKEMPTSGSKEKTKVEATKNETSAPFKEKPTPSLNNTCTTSEDSLVLYNRVAVQGDVVRELKAKKAPKEDIDAAVKQLLSLKAEYKEKTGQEYKPGNPPAEIGQNMSSNSSTSILESKSLYDEVAAQGEVVRKLKAEKALKAKINEAVECLLSLKAQYKEKTGKEYIPGQPPLSQSSDSSPARNSEPAGLETPEAKVLFDKVAAQGDVVRKLKTEKASKDQIDTAVQELLQLKAQYKSLTGIEYKPVSATGAEDKDKKKKEKENKSEKQNKPQKQNDGQRKDPSKNQGGGLSSSGAGEGQGPKKQTRLGLEAKKEENLADWYSQVITKAEMIEYHDVSGCYILRPWAYAIWEAIKDFFDAEIKKLGVENCYFPMFVSQGALEKEKTHVADFAPEVAWVTRSGKTELAEPIAIRPTSETVMYPAYAKWVQSHRDLPIRLNQWCNVVRWEFKHPQPFLRTREFLWQEGHSAFATIEEAAEEVLQILDLYAQVYEELLAIPVVKGRKTEKEKFAGGDYTTTVEAFISASGRAIQGGTSHHLGQNFSKMFEITFEDPKMPGEKQFAYQNSWGLTTRTIGVMTMIHGDNMGLVLPPRVACVQVVVIPCGITNALSEEDKEALMAKCNDYRRRLLSVNIRVRADLRDNYSPGWKFNHWELKGVPIRLEVGPRDMKNCQFVAVRRDTGEKLTVAENEAETKLQAILEDIHVTLFTRASEDLKTHMVVANTMEDFQKILDSGKIVQIPFCGEIDCEDWIKKTTARDQDLEPGAPSMGAKSLCIPFKPLCELQPGAKCVCGKNPAKYYTLFGRSY

SEQ ID NO: 41 - protein, 1490 aa, Artificial Sequence
  EPRS EHH50530.1
MATLCLTVNSGDPGALLAVEHVKDDVSISIEEGKENILRVSENVIFTDVNSILRYLARVATTAGLYGCNLMEHTEIDHWLEFSATKLSSCDSFTSAINELNHCLSLRTYLVGNSLSLADLCVWATLKGNAAWQEQLKQNKAPVHVKRWFGFLEAQQTFQSVGTKWDVSTTKARVAPEKKQDVGKFVELPGAEMGKVTVRFPPEASGYLHIGHAKAALLNQHYQVNFKGKLIMRFDDTNPEKEKEDFEKVILEDVAMLHIKPDQFTYTSDHFETIMKYAEKLIQEGKAYVDDTPAEQMKAEREQRIESKHRKNPIEKNLQMWEEMKKGSQFGQSCCLRAKIDMSSNNGCMRDPTLYRCKIQPHPRTGNKYNVYPTYDFACPIVDSIEGVTHALRTTEYHDRDEQFYWIIEALGIRKPYIWEYSRLNLNNTVLSKRKLTWFVNEGLVDGWDDPRFPTVRGVLRRGMTVEGLKQFIAAQVIDPVAPRYVALLKKEVIPVNVPEAQEEMKEVAKHPKNPEVGLKPVWYSPKVFVEGADAETFSEGEMVTFINWGNLNITKIHKNTDGKIISLDAKLNLENKDYKKTTKITWLAETTHAPPVPAICVTYEHLITKPVLGKDEDFKQYVNKNSKHEELMLGDPCLKDLKKGDIIQLQRRGFFICDQPYEPVSPYSCKEAPCVLIYIPDGHTKEMPTSGSKEKTKVEATKNETSAPFKERPTPSLNNNCTTSEDSLVLYNRVAVQGDVVRELKAKKAPKEDIDAAVKQLLSLKAEYKEKTGQEYKPGNPPAEIGQNISSNSSASILESKSLYDQVAAQGEVVRKLKAEKAPKAKINEAVECLLSLKAQYKEKTGKEYIPGQPPLSQSSDSSPTRNSEPAGLETPEAKLLFDKVASQGEVVRKLKTEKAPKDQVDIAVQELLQLKAQYKSLIGVEYKPVSATGAEDKDKKKKEKENKSEKQNKPQKQNDGQRKDPSKNQGGGLSSSGAGEGQGPKKQTRLGLEAKKEENLADWYSQVITKSEMIEYHDVSGCYILRPWAYAIWEAIKDFFDAGIKKLGVENCYFPMFVSQGALEKEKTHIADFAPEVAWVTRSGKTELAEPIAIRPTSETVMYPAYAKWVQSHRDLPIKLNQWCNVVRWEFKHPQPFLRTREFLWQEGHSAFATMEEAAEEVLQILDLYAQVYEELLAIPVVRGRKTEKEKFAGGDYTTTVEAFISASGRAIQGGTSHHLGQNFSKMFEIVFEDPKTPGEKQFAYQNSWGLTTRTIGVMTMVHGDNMGLVLPPRVACVQVVIIPCGITNALSEEDKEALIAKCNDYRRRLLNVNIRVRADLRDNYSPGWKFNHWELKGVPIRLEVGPRDMKSCQFVAVRRDTGEKLTVAENEAETKLQAILEDIHVTLFTRASEDLKTHMVVANTMEDFQKILDSGKIVQIPFCGEIDCEDWIKKTTARDQDLEPGAPSMGAKSLCIPFKPLCELQPGAKCVCGKNPAKFYTLFGRSY

SEQ ID NO: 42 - protein, 1527 aa, Artificial Sequence
  EPRS XP_002808297.1
  misc_feature (1129): Xaa is any amino acid
MATLCLTVNSGDPPLGALLAVEHVKDDVSISIEEGKENILRVSENVIFTDVNSILRYLARVATTAGLYGCNLMEHTEIDHWLEFSATKLSSCDSFTSAINELNHCLSLRTYLVGNSLSLADLCVWATLKGNAAWQEQLKQNKAPVHVKRWFGFLEAQQTFQSVGTKWDVSTTKARVAPEKKQDVGKFVELPGAEMGKVTVRFPPEASGYLHIGHAKAALLNQHYQVNFKGKLIMRFDDTNPEKEKEDFEKVILEDVAMLHIKPDQFTYTSDHFETIMKYAEKLIQEGKAYVDDTPAEQMKAEREQRIESKHRKNPIEKNLQMWEEMKKGSQFGQSCCLRAKIDMSSNNGCMRDPTLYRCKIQPHPRTGNKYNVYPTYDFACPIVDSIEGVTHALRTTEYHDRDEQFYWIIEALGIRKPYIWEYSRLNLNNTVLSKRKLTWFVNEGLVDGWDDPRFPTVRGVLRRGMTVEGLKQFIAAQGSSRSVVNMEWDKIWAFNKKLRALCKKVIDPVAPRYVALLKKEVIPVNVPEAQEEMKEVAKHPKNPEVGLKPVWYSPKVFVEGADAETFSEGEMVTFINWGNLNITKIHKNTDGKIISLDAKLNLENKDYKKTTKITWLAETTHAPPVPAICVTYEHLITKPVLGKDEDFKQYVNKNSKHEELMLGDPCLKDLKKGDIIQLQRRGFFICDQPYEPVSPYSCKEAPCVLIYIPDGHTKEMPTSGSKEKTKVEATKNETSAPFKERPTPSLNNNCTTSEDSLVLYNRVAVQGDVVRELKAKKAPKEDIDAAVKQLLSLKAEYKEKTGQEYKPGNPPAEIGQNISSNSSASILESKSLYDQVAAQGEVVRKLKAEKAPKAKINEAVECLLSLKAQYKEKTGKEYIPGQPPLSQSSDSSPTRNSEPAGLETPEAKLLFDKVASQGEVVRKLKTEKAPKDQVDIAVQELLQLKAQYKSLIGVEYKPVSATGAEDKDKKKKEKENKSEKQNKPQKQNDGQRKDPSKNQGGGLSSSGAGEGQGPKKQTRLGLEAKKEENLADWYSQVITKSEMIEYHDVSGCYILRPWAYAIWEAIKDFFDAGIKKLGVENCYFPMFVSQGALEKEKTHIADFAPEVSELLFYFFAVTYSLKGEIKPXMTVSIFPCLSVMYPAYAKWVQSHRDLPIKLNQWCNVVRWEFKHPQPFLRTREFLWQEGHSAFATMEEAAEEVLQILDLYAQVYEELLAIPVVRGRKTEKEKFAGGDYTTTVEAFISASGRAIQGGTSHHLGQNFSKMFEIVFEDPKTPGEKQFAYQNSWGLTTRTIGVMTMVHGDNMGLVLPPRVACVQVVIIPCGITNALSEEDKEALIAKCNDYRRRLLNVNIRVRADLRDNYSPGWKFNHWELKGVPIRLEVGPRDMKSCQFVAVRRDTGEKLTVAENEAETKLQAILEDIHVTLFTRASEDLKTHMVVANTMEDFQKILDSGKIVQIPFCGEIDCEDWIKKTTARDQDLEPGAPSMGAKSLCIPFKPLCELQPGAKCVCGKNPAKFYTLFGRSY

SEQ ID NO: 43 - protein, 1499 aa, Artificial Sequence
  EPRS XP_009185375.1
MATLCLTVNSGDPPLGALLAVEHVKDDVSISIEEGKENILHVSENVIFTDVNSILRYLARVATTAGLYGCNLMEHTEIDHWLEFSATKLSSCDSFTSAINELNHCLSLRTYLVGNSLSLADLCVWATLKGNAAWQEQLKQNKAPVHVKRWFGFLEAQQAFQSVGTKWDVSTTKARVAPEKKQDVGKFVELPGAEMGKVTVRFPPEASGYLHIGHAKAALLNQHYQVNFKGKLIMRFDDTNPEKEKEDFEKVILEDVAMLHIKPDQFTYTSDHFETIMKYAEKLIQEGKAYVDDTPAEQMKAEREQRIESKHRKNPIEKNLQMWEEMKKGSQFGQSCCLRAKIDMSSNNGCLRDPTLYRCKIQPHPRTGNKYNVYPTYDFACPIVDSIEGVTHALRTTEYHDRDEQFYWIIEALGIRKPYIWEYSRLNLNNTVLSKRKLTWFVNEGLVDGWDDPRFPTVRGVLRRGMTVEGLKQFIAAQGSSRSVVNMEWDKIWAFNKKVIDPVAPRYIALLKKEVIPVNVPEAQEEMKEVAKHPKNPEVGLKPVWYSNSEFMAAVVNISLNTFNLLSRNTDGKIISLDAKLNLENKDYKKTTKITWLAETTHALPVPAICVTYEHLITKPVLGKDEDFKQYVNKNSKHEELMLGDPCLKDLKKGDIIQLQRRGFFICDQPYEPVSPYSCKEAPCVLIYIPDGHTKEMPTSGSKEKTKVEATKNETSAPFKERPTPSLNNNCTTSEDSLVLYNRVAVQGDVVRELKAKKAPKEDIDAAVKQLLSLKAEYKEKTGQEYKPGNPPAEIGQNISSNSSASILESKSLYDQVAAQGEVVRKLKAEKAPKAKINEAVECLLSLKAQYKEKTGKEYIPGQPPLSQSSDSSPTRNSEPAGLETPEAKLLFDKVASQGEVVRKLKTEKAPKDQIDIAVQELLQLKAQYKSLIGVEYKPVSATGAEDKDKKKKEKENKSEKQNKPQKQNDGQRKDPSKNQGGGLSSSGAGEGQGPKKQTRLGLEAKKEENLADWYSQVITKSEMIEYHDVSGCYILRPWAYAIWEAIKDFFDAGIKKLGVENCYFPMFVSQGALEKEKTHIADFAPEVAWVTRSGKTELAEPIAIRPTSETVMYPAYAKWVQSHRDLPIKLNQWCNVVRWEFKHPQPFLRTREFLWQEGHSAFATMEEAEEEVLQILDLYAQVYEELLAIPVVRGRKTEKEKFAGGDYTTTIEAFISASGRAIQGGTSHHLGQNFSKMFEIVFEDPKTPGEKQFAYQNSWGLTTRTIGVMTMVHGDNMGLVLPPRVACVQVVIIPCGITNALSEEDKEALIAKCNDYRRRLLNVNIRVRADLRDNYSPGWKFNHWELKGVPIRLEVGPRDMKSCQFVAVRRDTGEKLTVAENEAETKLQAILEDIHVTLFTRASEDLKTHMVVANTMEDFQKILDSGKIVQIPFCGEIDCEDWIKKTTARDQDLEPGAPSMGAKSLCIPFKPLCELQPGAKCVCGKNPAKFYTLFGRSY

SEQ ID NO: 44 - protein, 1510 aa, Artificial Sequence
  EPRS EHH15538.1
  misc_feature (1414)..(1439): Xaa is any amino acid
MATLCLTVNSGDPGALLAVEHVKDDVSISIEEGKENILRVSENVIFTDVNSILRYLARVATTAGLYGCNLMEHTEIDHWLEFSATKLSSCDSFTSAINELNHCLSLRTYLVGNSLSLADLCVWATLKGNAAWQEQLKQNKAPVHVKRWFGFLEAQQTFQSVGTKWDVSTTKARVAPEKKQDVGKFVELPGAEMGKVTVRFPPEASGYLHIGHAKAALLNQHYQVNFKGKLIMRFDDTNPEKEKEDFEKVILEDVAMLHIKPDQFTYTSDHFETIMKYAEKLIQEGKAYVDDTPAEQMKAEREQRIESKHRKNPIEKNLQMWEEMKKGSQFGQSCCLRAKIDMSSNNGCMRDPTLYRCKIQPHPRTGNKYNVYPTYDFACPIVDSIEGVTHALRTTEYHDRDEQFYWIIEALGIRKPYIWEYSRLNLNNTVLSKRKLTWFVNEGLVDGWDDPRFPTVRGVLRRGMTVEGLKQFIAAQGSSRSVVNMEWDKIWAFNKKVIDPVAPRYVALLKKEVIPVNVPEAQEEMKEVAKHPKNPEVGLKPVWYSPKVFVEGADAETFSEGEMVTFINWGNLNITKIHKNTDGKIISLDAKLNLENKDYKKTTKITWLAETTHAPPVPAICVTYEHLITKPVLGKDEDFKQYVNKNSKHEELMLGDPCLKDLKKGDIIQLQRRGFFICDQPYEPVSPYSCKEAPCVLIYIPDGHTKEMPTSGSKEKTKVEATKNETSAPFKERPTPSLNNNCTTSEDSLVLYNRVAVQGDVVRELKAKKAPKEDIDAAVKQLLSLKAEYKEKTGQEYKPGNRPAEIGQNISSNSSASILESKSLYDQVAAQGEVVRKLKAEKAPKAKINEAVECLLSLKAQYKEKTGKEYIPGQPPLSQSSDSSPTRNSEPAGLETPEAKLLFDKVASQGEVVRKLKTEKAPKDQVDIAVQELLQLKAQYKSLIGVEYKPVSATGAEDKDKKKKEKENKSEKQNKPQKQNDGQRKDPSKNQGGGLSSSGAGEGQGPKKQTRLGLEAKKEENLADWYSQVITKSEMIEYHDVSGCYILRPWAYAIWEAIKDFFDAGIKKLGVENCYFPMFVSQGALEKEKTHIADFAPEVAWVTRSGKTELAEPIAIRPTSETVMYPAYAKWVQSHRDLPIKLNQWCNVVRWEFKHPQPFLRTREFLWQEGHSAFATMEEAAEEVLQILDLYAQVYEELLAIPVVRGRKTEKEKFAGGDYTTTVEAFISASGRAIQGGTSHHLGQNFSKMFEIVFEDPKTPGEKQFAYQNSWGLTTRTIGVMTMVHGDNMGLVLPPRVACVQVVIIPCGITNALSEEDKEALIAKCNDYRRRLLNVNIRVRADLRDNYSPGWKFNHWELKGVPIRLEVGPRDMKSCQFVAVRRDTGEKLTVAENEAETKLQAILEDIHVTLFTRXXXXXXXXXXXXXXXXXXXXXXXXXXIVQIPFCGEIDCEDWIKKTTARDQDLEPGAPSMGAKSLCIPFKPLCELQPGAKCVCGKNPAKFYTLFGRSY

SEQ ID NO: 45 - protein, 1495 aa, Artificial Sequence
  EPRS XP_004028474.1
  misc_feature (264): Xaa is any amino acid
MATLCLTVNSGDPPLGALLAVEHVKDDVSISVEEGKENILHVSENVIFTDVNSILRYLARVATTAGLYGSNLMEHTEIDHWLEFSATKLSSCDSFTSAINELNHCLSLRTYLVGNSLSLADLCVWATLKGNAAWQEQLKQKKAPVHVKRWFGFLEVQQAFQSVGTKWDVSTTKARVAPEKKQDVGKFVELPGAEMGKVTVRFPPEASGYLHIGHAKAALLNQHYQVNFKGKLIMRFDDTNPEKEKEDFEKVIKSVVMTLCQKSXIKVTGLPNTFMNFTIIKPGVPHLGSITIEKNLQMWEEMKKGSQFGQSCCLRAKIDMSSNNGCMRDPTLYRCKIQPHPRTGNKYNVYPTYDFACPIVDSIEGVTHALRTTEYHDRDEQFYWIIEALGIRKPYIWEYSRLNLNNTVLSKRKLTWFVNEGLVDGWDDPRFPTVRGVLRRGMTVEGLKQFIAAQGSSRSVVNMEWDKIWAFNKKLRALCKKVIDPVAPRYVALLKKEVIPVNVPEAQEEMKEVAKHPKNPEVGLKPVWYSPKVFIEGADAETFLEGEMVTFINWGNLNITKIHKNADGKIISLDAKLNLENKDYKKTTKITWLAETTHALPIPVICVTYEHLITKPVLGKDEDFKQYVNKNSKHEELMLGDPCLKDLKKGDIIQLQRRGFFICDQPYEPVSPYSCKEAPCVLIYIPDGHTKEMPTSGSKEKTKVEATKNETSAPFKERPTPSLNNNCTTSEDSLVLYNRVAVQGDVVRELKAKKAPKEDVDAAVKQLLSLKAEYKEKTGQEYKPGNPPAEIGQNISSNSSASILESKPLYDEVAAQGEVVRKLKAEKAPKAKINEAVECLLSLKAQYKEKTGKEYISGQPPLSQSSDSSPTRNSEPAGLETPEAKVLFDKVASQGEVVRKLKTEKAPKDQVDIAVQELLQLKAQYKSLIGVEYKPVSATGAEDKDKKKKEKENKSEKQNKPQKQNDGQRKDPSKNQGGGLSSSGAGEGQGPKKQTRLGLEAKKEENLADWYSQVITKSEMIEYHDVSGCYILRPWAYAIWEAIKDFFDAEIKKLGVENCYFPMFVSQSALEKEKTHIADFAPEVAWVTRSGKTELAEPIAIRPTSETVMYPAYAKWVQSHRDLPIKLNQWCNVVRWEFKHPQPFLRTREFLWQEGHSAFATMEEAAEEVLQILDLYAQVYEELLAIPVVKGRKTEKEKFAGGDYTTTIEAFISASGRAIQGGTSHHLGQNFSKMFEIVFEDPKTPGEKQFAYQNSWGLTTRTIGVMTMVHGDNMGLVLPPRVACVQVVIIPCGITNALSEEDKEALIAKCNDYRRRLLSVNIRVRADLRDNYSPGWKFNHWELKGVPIRLEVGPRDMKSCQFVAVRRDTGEKLTVAENEAETKLQAILEDIQVTLFTRASEDLKTHMVVANTMEDFQKILDSGKIVQIPFCGEIDCEDWIKKTTARDQDLEPGAPSMGAKSLCIPFKPLCELQPGAKCVCGKNPAKYYTLFGRSY

SEQ ID NO: 46 - protein, 1494 aa, Artificial Sequence
  EPRS XP_008983438.1
MATLCLTVNSGDPPLGALLAVEHVKDDVSISVEEGKENTLRVSELKCWSAFFFYLLCSQIDHWLEFSATKLSSCNSFTSAINELNHCLSLRTYLVGNSLSLADLCVWATLKGNAAWQEQLKQNKAPVHVKRWFGFLEAQQAFQSVGTQWDVSTAKARVAPEKKQDVGKFVELPGAEMGKVTVRFPPEASGYLHIGHAKAALLNQHYQVNFKGKLIMRFDDTNPEKEKEDFEKVILEDVAMLHIKPDQFTYTSDHFETIMKYAEKLIQEGKAYVDDTPAEQMKAEREQRIESKHRKNPIEKNLQMWEEMKKGSQFGQSCCLRAKIDMSSNNGCMRDPTLYRCKIQPHPRTGNKFNVYPTYDFACPIVDSIEGVTHALRTTEYHDRDEQFYWIIEAVGIRKPYIWEYSRLNLNNTVLSKRKLTWFVNEGLVDGWDDPRFPTVRGVLRRGMTVEGLKQFIAAQGSSRSVVNMEWDKIWAFNKKVIDPVAPRYVALLKKEVIPVNVPGAQEEMKEVAKHPKNPDVGLKPVWYSPKVFVEGADAETFSEGEMVTFINWGNLNITKIHKNAAGKITSLDAKLNLENKDYKKTTKITWLAETTHALPIPAICVTYEHLITKPVLGKDEDFKQYVNKDSKHEELMLGDPCLKDLKKGDIIQLQRRGFFICDQPYEPVSPYSCKEAPCVLIYIPDGHTKEMPTSGSKEKTKVEATKNETSAPFKEEPTPSLDNTCTASEDSLVLYNRVAVQGDVVRELKAKKAPKEDIDAAVKQLLSLKAEYKEKTGQEYKPGNPPAEIGQNISSNSSASILQSKSLYDEVAAQGEVVRKLKAEKAPKAKINEAVECLLSLKAQYKEKTGKEYIPGQPPLSQSSDSSPARNSEPAGLETPEAKVLFNQVASQGDVVRKLKTEKASKDQIDTAVQELLQLKAQYKSLTGVEYKPVSATGAEDKDKKKKEKENKSEKQNKPQKQNDGQRKDPSKNQGGGLSSSGAGEGQGPKKQTRLGLEAKKEENLADWYSQVITKAEMIEYHDVSGCYILRPWAYAIWEAIKDFFDAEIKKLGVENCYFPMFVSQGALEKEKTHVADFAPEVAWVTRSGKTELAEPIAIRPTSETVMYPAYAKWVQSHRDLPIRLNQWCNVVRWEFKHPQPFLRTREFLWQEGHSAFATIEEAAEEVLQILDLYAQIYEELLAIPVVKGRKTEKEKFAGGDYTTTVEAFISASGRAIQGGTSHHLGQNFSKMFEIMFEDPKTPGEKQFAYQNSWGLTTRTIGVMTMIHGDNMGLVLPPRVACVQVVVIPCGITNALSEEDKEALMAKCNDYRRRLLSVNIRVRADLRDNYSPGWKFNHWELKGVPIRLEVGPRDMKNCQFVAVRRDTGEKLTVSENEAETKLQAILEDIHVTLFTRASEDLKTHMVVANTMEDFQKILDSGKIVQIPFCGEIDCEDWIKKTTARDQDLEPGAPSMGAKSLCIPFKPLCELQPGAKCVCGKNPAKYYTLFGRSY

SEQ ID NO: 47 - protein, 1513 aa, Artificial Sequence
  EPRS XP_008053500.1
MATLCLTVNSGDPPLGALLAIEHVKDDVSISVEEGKENILRVSENVVFTDVNSILRYLARVATTVGLYGSNLMEHTEIDHWLEFSATKLSSCNLFTSAISELNHCLSLRTYLVGNSLSLADLCVWATLQGNAAWQEQLKQNKAPVHVKRWFGFLEAQQAFQSVGTKWDISTTKAKVTPEKKQDVGKFIELPGAEMGKVTVRFPPEASGYLHIGHAKAALLNQHYQVNFKGKLIMRFDDTNPEKEKEDFEKVILEDVAMLHIKPDQFTYTSDHFETIMKYAEKLIQEGKAYVDDTPAEQMKVEREQRVESKHRKNSVEKNLQMWEEMKKGSQFGQSCCLRAKIDMSSNNGCMRDPTLYRCKIQPHPRTGNKYNVYPTYDFACPIVDSIEGVTHALRTTEYHDRDEQFYWIIEALGIRKPYIWEYSRLNLNNTVLSKRKLTWFVNEGLVDGWDDPRFPTVRGVLRRGMTVEGLKQFIAAQGSSRSVVNMEWDKIWAFNKKVIDPVAPRYVALLKKEVIPVNVPEAQEEMKEVAKHPKNLDIGLKPVWYSPKIFIEGADAETFSEGEMVTFINWGNINITKIHKNTGGKIVSLDAKLNLENKDYKKTTKITWLAETTHALPIPAICVTYEHLITKPVLGKDEDFKQYVNKNSKHEELMLGDPCLKDLKKGDIIQLQRRGFFICDQPYEPVSPYSCKESPCILIYIPDGHTKEMPTSGSKEKTKAETIKNEKTSASFKERPAPTLNNPCAISGDSLALYNRVAVQGDVVRELKAKKAAKEDIDAAVKQLLSLKAEYKERTSQEYKPGNPPAGIAQNISFKSSASILESKSLYDEVAAQGEVVRKLKAEKTSKAKINEAVEYLLSLKAQYKEKTGKEYIPGQPPLSQSSDSSPSRTSEPTDPETPEAKVLFDKVATQGEVVRKLKAEKASKDQVDTAVQELLKLKALYKSLTGVDYKPVSATGAEDKDKKKKEKENKSEKQNKAQKQNDGQRKDSSKNQGGGLSSSGAGEGQGPKKQTRLGLEAKKEENLAEWYSQVITKSEMIEYYDISGCYILRPWAYSIWESIKEFFDAGIKKLGVENCYFPMFVSQGALEKEKTHVADFAPEVAWVTRSGKTELAEPIAIRPTSETVMYPAYAKWVQSHRDLPIRLNQWCNVVRWEFKHPQPFLRTREFLWQEGHSAFATVEEAAEEVLQILDLYAQVYEDLLAIPVVKGRKTEKEKFAGGDYTTTLEAFISASGRAIQGATSHHLGQNFSKMCEIVFEDPKTPGEKQFAYQNSWGLTTRTIGVMTMVHGDNMGLVLPPRVACVQVVIIPCGITNALSEEDREALIAKCNDYRRRLLNVNIRVKVDLRDNYSPGWKFNHWELKGVPIRLEVGPRDMKSFQFVAVRRDTGEKLTVTENEAEIKLQAILEDIHVTLFTRASEDLKTHMVVANTMEEFQKILDSGKIAQIPFCGEIDCEDWIKKTTARDQDIEPGAPSMGAKSLCIPFKPLCELQPGAKCICGKNPAKYYTLFGRSY

SEQ ID NO: 48 - protein, 1512 aa, Artificial Sequence
  EPRS XP_001488980.1
MATLCLTVNTGDPPLGALLAVEHVKDTVSISVEEGKENILRVSENVVFTDVNSILRYLARVAATAGLYGSNLMEHTEIDHWLEFSATKLSSCDLFASAVNELNHCLSLRTFLVGNSLSLADLCVWATLKGNAAWQEQLSQSKAPVHVKRWFGFLEAQQAFQLVGTKWNVSAAKAKVAPEKKQDIGKFVELPGAEMGKVTVRFPPEASGYLHIGHAKAALLNQHYQVNFKGKLIMRFDDTNPEKEKEDFEKVILEDVAMLHIKPDQFTYTSDHFETIMKYAEKLIQEGKAYVDDTPAEQMKAEREQRIESKHRKNSIEKNLQMWEEMKKGSQFGQSCCLRAKIDMSSNNGCMRDPTLYRCKIQPHPRTGNKYNVYPTYDFACPIVDSIEGVTHALRTTEYHDRDEQFYWIIEALGIRKPYIWEYSRLNLNNTVLSKRKLTWFVNEGLVDGWDDPRFPTVRGVLRRGMTVEGLKQFIAAQGSSRSVVNMEWDKIWAFNKKVIDPVAPRYVALLKKEVVLVNVPEAQEEMKEVAKHPKNPDVGLKPVWYSPKVFIEGADAETLSEGEMVTFINWGNINITKIHRNADGKIVSLDAKLNLENKDYKKTTKITWLAETARALPVPAVCVTYEHLITKPVLGKDEDFKQYVNKNSKHEELMLGDPCLKDLKKGDIIQLQRRGFFICDQPYEPVSPYSCREAPCVLIFIPDGHTKEMPTSGSKEKTKVEATKNETTTPLKERPAPSLNNTCATSEDSLVLYNKVAAQGDVVRELKAKKAAKEDVDAAVKQLLALKAEYKEKTGQEYKPGNPPAAVVQNVSSKSSATVLESKALYDEVAAQGEVVRKLKAEKAPKAKVNEAVESLLSLKAQYKEKTGKEYIPGQPPLSQSSDSSPTRSSEPCGPETPEAKVLFDKVASQGEVVRKLKAEKASKDQVDTAVQELLQLKAQYKALTGVEYKPVSATGVEDRDKRKKEKENKSEKQNKSQKQNDGQKKDPFRNQGSGLSSDGTGEGQGPKKQTRLGLEAKKEENLSEWYSQVITKSEMIEYYDVSGCYILRPWAYSIWESIKDFFDAEIKKLGVENCYFPMFVSQGALEKEKTHIADFAPEVAWVTRSGKTELAEPIAVRPTSETVMYPAYAKWVQSHRDLPIRLNQWCNVVRWEFKHPQPFLRTREFLWQEGHSAFATFEEAAEEVLQILDLYAQVYEELLAIPVVKGRKTEKEKFAGGDYTTTIEAFISASGRAIQGGTSHHLGQNFSKMFEIIFEDPKTPGEKQFAYQNSWGLTTRTIGVMTMVHGDNMGLVLPPRVACVQVVVIPCGITNALSEEDRDALIAKCNDYRRRLLNVNIRVRVDLRDNYSPGWKFNHWELKGVPIRLEVGPRDMKSCQFVAVRRDTGEKLTVAENEAETKLQAILEDIHVNLFTKASEDLKTHMVVANTMEDFQKVLDSGKIAQIPFCGEIDCEDWIKKTTARDQDLEPGAPSMGAKSLCIPFKPLCELQPGARCVCGKNPAKFYTLFGRSY

SEQ ID NO: 49 - protein, 1512 aa, Artificial Sequence
  EPRSXP_008541056.1
MATLCLTVNTGDPPLGALLAVEHVKDTVSISVEEGKENILRVSENVVFTDVNSILRYLARVAATAGLYGSNLMEHTEIDHWLEFSATKLSSCDLFASAVNELNHCLSLRTFLVGNSLSLADLCVWATLKGNAAWQEQLSQSKAPVHVKRWFGFLEAQQAFQLVGTKWNVSAAKAKVAPEKKQDIGKFVELPGAEMGKVTVRFPPEASGYLHIGHAKAALLNQHYQVNFKGKLIMRFDDTNPEKEKEDFEKVILEDVAMLHIKPDQFTYTSDHFETIMKYAEKLIQEGKAYVDDTPAEQMKAEREQRIESKHRKNSIEKNLQMWEEMKKGSQFGQSCCLRAKIDMSSNNGCMRDPTLYRCKIQPHPRTGNKYNVYPTYDFACPIVDSIEGVTHALRTTEYHDRDEQFYWIIEALGIRKPYIWEYSRLNLNNTVLSKRKLTWFVNEGLVDGWDDPRFPTVRGVLRRGMTVEGLKQFIAAQGSSRSVVNMEWDKIWAFNKKVIDPVAPRYVALLKKEVVLVNVPEAQEEMKEVAKHPKNPDVGLKPVWYSPKVFIEGADAETLSEGEMVTFINWGNINITKIHRNADGKIVSLDAKLNLENKDYKKTTKITWLAETARALPVPAVCVTYEHLITKPVLGKDEDFKQYVNKNSKHEELMLGDPCLKDLKKGDIIQLQRRGFFICDQPYEPVSPYSCREAPCVLIFIPDGHTKEMPTSGSKEKTKVEATKNETTTPLKERPAPSLNNTCATSEDSLVLYNKVAAQGDVVRELKAKKAAKEDVDAAVKQLLALKAEYKEKTGQEYKPGNPPAAVVQNVSSKSSATVLESKALYDEVAVQGEVVRKLKAEKAPKAKVNEAVESLLSLKAQYKEKTGKDYIPGQPPLSQSSDSSPTRSSEPCGPETPEAKVLFDKVASQGEVVRKLKAEKASKDQVDTAVQELLQLKAQYKALTGVEYKPVSATGVEDRDKRKKEKENKSEKQNKSQKQNDGQKKDPFRNQGSGLSSDGTGEGQGPKKQTRLGLEAKKEENLSEWYSQVITKSEMIEYYDVSGCYILRPWAYSIWESIKDFFDAEIKKLGVENCYFPMFVSQGALEKEKTHIADFAPEVAWVTRSGKTELAEPIAVRPTSETVMYPAYAKWVQSHRDLPIRLNQWCNVVRWEFKHPQPFLRTREFLWQEGHSAFATFEEAAEEVLQILDLYAQVYEELLAIPVVKGRKTEKEKFAGGDYTTTIEAFISASGRAIQGGTSHHLGQNFSKMFEIIFEDPKTPGEKQFAYQNSWGLTTRTIGVMTMVHGDNMGLVLPPRVACVQVVVIPCGITNALSEEDRDALIAKCNDYRRRLLNVNIRVRVDLRDNYSPGWKFNHWELKGVPIRLEVGPRDMKSCQFVAVRRDTGEKLTVAENEAETKLQAILEDIHVNLFTKASEDLKTHMVVANTMEDFQKVLDSGKIAQIPFCGEIDCEDWIKKTTARDQDLEPGAPSMGAKSLCIPFKPLCELQPGARCVCGKNPAKFYTLFGRSY

SEQ ID NO: 50 - protein, 1509 aa, Artificial Sequence
  EPRS XP_849468.1
MATLCLTVNAGDPPLGALLAVEHVKDNISISVEEGKENILHVSENVVFTDINSILRYLARVATTTGLYGSNLLEHTEIDHWLEFSATKLSSCNLFTSAINELNHCLSLRTYLVGNSLSLADLCVWATLKGNAAWQEQLKQNKAPVHIKRWFGFLEAQQAFQSVGTKWNISATKAKVTPEKKQDVGKFVELPGAEMGKVTVRFPPEASGYLHIGHAKAALLNQHYQVNFKGKLIMRFDDTNPEKEKEDFEKVILEDVAMLHIKPDQFTYTSDHFETIMKYAEKLIQEGKAYVDDTPAEQMKAEREQRIESKHRKNSVEKNLQMWEEMKKGSQFGQSCCLRAKIDMSSNNGCMRDPTLYRCKIQPHPRTGNKYNVYPTYDFACPIVDSIEGVTHALRTTEYHDRDEQFYWIIEALGIRKPYIWEYSRLNLNNTVLSKRKLTWFVNEGLVDGWDDPRFPTVRGVLRRGMTVEGLKQFIAAQGSSRSVVNMEWDKIWAFNKKVIDPVAPRYVALLKKEVIPVNIPEAQEEMKEVAKHPKNPDVGLKPVWYSSKVFIEGADAETLSEGEMVTFINWGNINIAKIHKNADGKIESLDAKLNLENKDYKKTTKITWLAETAHALPIPAICVTYEHLITKPVLGKDEDFKQYVNKNSKHEELMLGDPCLKDLKKGDIIQLQRRGFFICDQPYEPVSPYSCKEAPCVLIYIPDGHTKEMPTSGSKEKTKVETTKNEPTTPFKEKAGPSLLNTCATFEDSLVLYNRVAAQGDVVRELKAKKAAKEDIDAAVKQLLALKAEYKEKTGQEYKPGNPPAVVPNVSSTSSASIVESKSLYDEVAAQGEVVCKLKAEKAPKAKVNEAVECLLSLKAQYKEKTGKEYIPGQPPLSQSSHSTAGSESSGPEAPEAKVLFDKVASQGEVVRKLKAEKASKDQVDVAVQELLQLKAQYKSLTGVEYKPVSATGAEDKDKKKKEKENKSEKQNKPLKQSDGQKKDSYKNQGSGLSSSGAGEGQGPKKQTRLGLEAKKEENLADWYSQVITKSEMIEYYDVSGCYILRPWAYSIWESIKDFFDAEIKKLGVENCYFPMFVSQGALEKEKTHVADFAPEVAWVTRSGKTELAEPIAVRPTSETVMYPAYAKWVQSHRDLPIRLNQWCNVVRWEFKHPQPFLRTREFLWQEGHSAFATFEEAAEEVLQILDLYAKVYEELLAIPVVKGRKTEKEKFAGGDYTTTIEAFISASGRAIQGATSHHLGQNFSKMFEIIFEDPKTPGEKQFAYQNSWGLTTRTIGVMTMVHGDNMGLVLPPRVASVQVVVIPCGITNALSEEDRDALIIKCNDYRRRLLSVNVRVKVDLRDNYSPGWKFNHWELKGVPIRLEVGPRDMKSCQFVAVRRDTGEKLTVADNEAETKLKAILEDIHVNLFTRASEDLKTHMVVANTMEDFQKMLDSGKIAQIPFCGEIDCEDWIKKTTARDQDLEPGAPSMGAKSLCIPFKPLCELQPGAKCICGKNPAKYYTLFGRSY

SEQ ID NO: 51 - protein, 1511 aa, Artificial Sequence
  EPRS XP_004013652.1
MATLCLTVNSGDPPLGALLAVEHVKDNVSISVEEGKENILHVSENVVFTDINSILRYLARIATTAGLYGSNLLEHTEIDHWLEFSATKLSSCDLFTSAVNELNHCLSLRTYLVGNSLSLADLCVWATLKGNAAWQEQLGQNKAPVHVKRWFGFLEAQQAFQSVGTKWNVSATKAKVVPEKKQDVGKFVELPGAEMGKVTVRFPPEASGYLHIGHAKAALLNQHYQVNFKGKLIMRFDDTNPEKEKEDFEKVILEDVAMLHIKPDQFTYTSDHFETIMKYAEKLIQEGKAYVDDTPAEQMKAEREQRIESKHRKNSVEKNLQMWEEMKKGSQFGQSCCLRAKIDMSSNNGCMRDPTLYRCKIQPHPRTGNKYNVYPTYDFACPIVDSIEGVTHALRTTEYHDRDEQFYWIIEALGIRKPFIWEYSRLNLNNTVLSKRKLTWFVNEGLVDGWDDPRFPTVRGVLRRGMTVEGLKQFIAAQGSSRSVVNMEWDKIWAFNKKVIDPVAPRYVALLKKEVVPVNVPEAQEEMKEVAKHPKNPDVGLKPVWYSSKVFIEGADAETLSEGEMVTFINWGNINITKIHKNAEGKIVSLDAKLNLENKDYKKTTKITWLAETEHALPVPAICVTYEHLITKPVLGKDEDFKQYVNKNSKHEELMLGDPCLKDLKKGDIIQLQRRGFFICDQPYEPVSPYSCIEAPCILIYIPDGHTKEMPTSGSKEKTKVETTKNEASTPLKTRSAPSLSTCATSEDSLVLYNRVAAQGDVVRELKAKKATKEDIDAAVKQLLALKAEYKEKTGQEYKPGNPPAAAGQNVSSKSSSNIVESKSLYDEVAAQGEVVRKLKAEKAPKAKVNEAVECLLSLKAQYKEKTGKEYVPGQPPSSQSSDSSPPRSSEPSGPETPEAKLLFDRVASQGEVVRKLKAEKASKDQVDTAVQDLLQLKAQYRSLTGVDYKPVSATGAEEKDKKKKEKENKSEKQNKPQKQNDTQKKDFSKNQGSGLSPNGAGEGQGPKKQTRLGLEARKEDSLADWYSQVITKSEMIEYHDVSGCYILRPWAYSIWESIKDFFDAEIKKLGVENCYFPMFVSQGALEKEKTHIADFAPEVAWVTRSGKTELAEPIAIRPTSETVMYPAYAKWVQSHRDLPIKLNQWCNVVRWEFKHPQPFLRTREFLWQEGHSAFATFEEAAEEVLQILDLYAQVYEELLAIPVVKGRKTEKEKFAGGDYTTTVEAFISASGRAIQGATSHHLGQNFSKMFEIVFEDPKTAGEKQLAYQNSWGLTTRTIGVMTMVHGDNVGLVLPPRVACVQVVVIPCGITNALSEEDRDALLAKCNDYRRRLLSVNIRVRVDLRDNYSPGWKFNHWELKGVPIRLEVGPRDMKNCQFVAVRRDTGEKLTIAENEAETKLRAILEDIHTNLFTRASEDLKTHMVVANTMEDFQKELDSGKIAQIPFCGEIDCEDWIKKTTARDQDLEPGAPSMGAKSLCIPFKPLCELPPGAKCVCGKNPAKYYTLFGRSY

SEQ ID NO: 52 - protein, 1516 aa, Artificial Sequence
  EPRS XP_005640882.1
MATLCLTVNAGDPPLGALLAVEHVKDNISISVEEGKENILHVSENVVFTDINSILRYLARVATTTGLYGSNLLEHTEIDHWLEFSATKLSSCNLFTSAINELNHCLSLRTYLVGNSLSLADLCVWATLKGNAAWQEQLKQNKAPVHIKRWFGFLEAQQAFQSVGTKWNISATKAKVTPEKKQDVGKFVELPGAEMGKVTVRFPPEASGYLHIGHAKAALLNQHYQVNFKGKLIMRFDDTNPEKEKEDFEKVILEDVAMLHIKPDQFTYTSDHFETIMKYAEKLIQEGKAYVDDTPAEQMKAEREQRIESKHRKNSVEKNLQMWEEMKKGSQFGQSCCLRAKIDMSSNNGCMRDPTLYRCKIQPHPRTGNKYNVYPTYDFACPIVDSIEGVTHALRTTEYHDRDEQFYWIIEALGIRKPYIWEYSRLNLNNTVLSKRKLTWFVNEGLVDGWDDPRFPTVRGVLRRGMTVEGLKQFIAAQGSSRSVVNMEWDKIWAFNKKLRALCKKVIDPVAPRYVALLKKEVIPVNIPEAQEEMKEVAKHPKNPDVGLKPVWYSSKVFIEGADAETLSEGEMVTFINWGNINIAKIHKNADGKIESLDAKLNLENKDYKKTTKITWLAETAHALPIPAICVTYEHLITKPVLGKDEDFKQYVNKNSKHEELMLGDPCLKDLKKGDIIQLQRRGFFICDQPYEPVSPYSCKEAPCVLIYIPDGHTKEMPTSGSKEKTKVETTKNEPTTPFKEKAGPSLLNTCATFEDSLVLYNRVAAQGDVVRELKAKKAAKEDIDAAVKQLLALKAEYKEKTGQEYKPGNPPAVVPNVSSTSSASIVESKSLYDEVAAQGEVVCKLKAEKAPKAKVNEAVECLLSLKAQYKEKTGKEYIPGQPPLSQSSHSTAGSESSGPEAPEAKVLFDKVASQGEVVRKLKAEKASKDQVDVAVQELLQLKAQYKSLTGVEYKPVSATGAEDKDKKKKEKENKSEKQNKPLKQSDGQKKDSYKNQGSGLSSSGAGEGQGPKKQTRLGLEAKKEENLADWYSQVITKSEMIEYYDVSGCYILRPWAYSIWESIKDFFDAEIKKLGVENCYFPMFVSQGALEKEKTHVADFAPEVAWVTRSGKTELAEPIAVRPTSETVMYPAYAKWVQSHRDLPIRLNQWCNVVRWEFKHPQPFLRTREFLWQEGHSAFATFEEAAEEVLQILDLYAKVYEELLAIPVVKGRKTEKEKFAGGDYTTTIEAFISASGRAIQGATSHHLGQNFSKMFEIIFEDPKTPGEKQFAYQNSWGLTTRTIGVMTMVHGDNMGLVLPPRVASVQVVVIPCGITNALSEEDRDALIIKCNDYRRRLLSVNVRVKVDLRDNYSPGWKFNHWELKGVPIRLEVGPRDMKSCQFVAVRRDTGEKLTVADNEAETKLKAILEDIHVNLFTRASEDLKTHMVVANTMEDFQKMLDSGKIAQIPFCGEIDCEDWIKKTTARDQDLEPGAPSMGAKSLCIPFKPLCELQPGAKCICGKNPAKYYTLFGRSY

SEQ ID NO: 53 - protein, 1511 aa, Artificial Sequence
  EPRS XP_005981363.1
MATLCLTVNSGDPPLGALLAVEHVKDNVSISVEEGKENILHVSENVVFTDINSILRYLARIATTAGLYGSNLLEHTEIDHWLEFSATKLSSCDLFTSAVNELNHCLSLRTYLVGNSLSLADLCVWATLKGNAAWQEQLGQNKAPVHVKRWFGFLEAQQAFQSVGTKWNVSATKAKVVPEKKQDVGKFVELPGAEMGKVTVRFPPEASGYLHIGHAKAALLNQHYQVNFKGKLIMRFDDTNPEKEKEDFEKVILEDVAMLHIKPDQFTYTSDHFETIMKYAEKLIQEGKAYVDDTPAEQMKAEREQRIESKHRKNSVEKNLQMWEEMKKGSQFGQSCCLRAKIDMSSNNGCMRDPTLYRCKIQPHPRTGNKYNVYPTYDFACPIVDSIEGVTHALRTTEYHDRDEQFYWIIEALGIRKPFIWEYSRLNLNNTVLSKRKLTWFVNEGLVDGWDDPRFPTVRGVLRRGMTVEGLKQFIAAQGSSRSVVNMEWDKIWAFNKKVIDPVAPRYVALLKKEVVPVNVPEAQEEMKEVAKHPKNPDVGLKPVWYSSKVFIEGADAETLSEGEMVTFINWGNINITKIHKNAEGKIVSLDAKLNLENKDYKKTTKITWLAETEHALPVPAICVTYEHLITKPVLGKDEDFKQYVNKNSKHEELMLGDPCLKDLKKGDIIQLQRRGFFICDQPYEPISPYSCIEAPCILIYIPDGHTKEMPTSGSKEKTKVETTKNEASTPLKTGSAPSLSTCATSEDSLVLYNRVAAQGDVVRELKAKKATKEDIDAAVKQLLALKAEYKEKTGQEYKPGNPPAAAGQNISSKSSSNIVESKSLYDEVAAQGEVVRKLKAEKAPKAKVNEAVECLLSLKAQYKEKTGKEYVPGQPPSSQSSDSSPPRSSEPSGPETPEAKLLFDKVASQGEVVRKLKAEKASKDQVDTAVQDLLQLKAQYKSLTGVDYKPISATGAEEKDKKKKEKENKSEKQNKPQKQNDTQKKDSSKNQGSGLSPNGAGEGQGPKKQTRLGLEARKEDSLADWYSQVITKSEMIEYHDVSGCYILRPWAYSIWESIKDFFDAEIKKLGVENCYFPMFVSQGALEKEKTHIADFAPEVAWVTRSGKTELAEPIAIRPTSETVMYPAYAKWVQSHRDLPIKLNQWCNVVRWEFKHPQPFLRTREFLWQEGHSAFATFEEAAEEVLQILDLYAQVYEELLAIPVVKGRKTEKEKFAGGDYTTTVEAFISASGRAIQGATSHHLGQNFSKMFEIVFEDPKTAGEKQLAYQNSWGLTTRTIGVMTMVHGDNVGLVLPPRVACVQVVVIPCGITNALSEEDRDALLAKCNDYRRRLLSVNIRVRVDLRDNYSPGWKFNHWELKGVPIRLEVGPRDMKNCQFVAVRRDTGEKLTVAENEAETKLHAILEDIHINLFTRASEDLKTHMVVANTMEDFQKELDSGKIAQIPFCGEIDCEDWIKKTTARDQDLEPGAPSMGAKSLCIPFKPLCELPPGAKCVCGKNPAKYYTLFGRSY

SEQ ID NO: 54 - protein, 1511 aa, Artificial Sequence
  EPRS XP_005690536.1
MATLCLTVNSGDPPLGALLAVEHVKDNVSISVEEGKENILHVTENVVFTDINSILRYLARIATTAGLYGSNLLEHTEIDHWLEFSATKLSSCDLFTSAVNELNHCLSLRTYLVGNSLSLADLCVWATLKGNAAWQEQLGQNKAPVHVKRWFGFLEAQQAFQSVGTKWNVSATKAKVVPEKKQDVGKFVELPGAEMGKVTVRFPPEASGYLHIGHAKAALLNQHYQVNFKGKLIMRFDDTNPEKEKEDFEKVILEDVAMLHIKPDQFTYTSDHFETIMKYAEKLIQEGKAYVDDTPAEQMKAEREQRIESKHRKNSVEKNLQMWEEMKKGSQFGQSCCLRAKIDMSSNNGCMRDPTLYRCKIQPHPRTGNKYNVYPTYDFACPIVDSIEGVTHALRTTEYHDRDEQFYWIIEALGIRKPFIWEYSRLNLNNTVLSKRKLTWFVNEGLVDGWDDPRFPTVRGVLRRGMTVEGLKQFIAAQGSSRSVVNMEWDKIWAFNKKVIDPVAPRYVALLKKEVVPVNVPEAQEEMKEVAKHPKNPDVGLKPVWYSSKVFIEGADAETLSEGEMVTFINWGNINITKIHKNAEGKIVSLDAKLNLENKDYKKTTKITWLAETEHALPVPAICVTYEHLITKPVLGKDEDFKQYVNKNSKHEELMLGDPCLKDLKKGDIIQLQRRGFFICDQPYEPVSPYSCIEAPCILIYIPDGHTKEMPTSGSKEKTKVETTKNEASTPLKTRSAPSLGTCATAEDSLVLYNRVAAQGDVVRELKAKKATKEDIDAAVKQLLALKADYKEKTGQEYKPGNPPAAAGQNISSKSSSNIVESKSLYDEVAAQGEVVRKLKAEKAPKAKVNEAVECLLSLKAQYKEKTGKEYVPGQPPSSQSSDSSPPRSSEPSGPETPEAKLLFDKVASQGEVVRKLKAEKASKDQVDTAVQDLLQLKAQYKSLTGVDYKPVSATGAEEKDKKKKEKENKSEKQNKPQKQNDTQKKDSSKNQGSGLSPNGAGEGQGPKKQTRLGLEARKEDSLADWYSQVITKSEMIEYHDVSGCYILRPWAYSIWESIKDFFDAEIKKLGVENCYFPMFVSQGALEKEKTHIADFAPEVAWVTRSGKTELAEPIAIRPTSETVMYPAYAKWVQSHRDLPIKLNQWCNVVRWEFKHPQPFLRTREFLWQEGHSAFATFEEAAEEVLQILDLYAQVYEELLAIPVVKGRKTEKEKFAGGDYTTTVEAFISASGRAIQGATSHHLGQNFSKMFEIVFEDPKTAGEKQLAYQNSWGLTTRTIGVMTMVHGDNVGLVLPPRVACVQVVVIPCGITNALSEEDRDALLAKCNDYRRRLLSVSIRVRVDLRDNYSPGWKFNHWELKGVPIRLEVGPRDMKNCQFVAVRRDTGEKLTIAENEAETKLRAVLEDIHINLFTRASEDLKTHMVVANTMEDFQKELDSGKIAQIPFCGEIDCEDWIKKTTARDQDLEPGAPSMGAKSLCIPFKPLCELPPGAKCVCGKNPAKYYTLFGRSY

SEQ ID NO: 55 - protein, 1509 aa, Artificial Sequence
  EPRS XP_002920053.1
MATLCLTVNAGDPPLGALLAVEHVKDNVSISVEEGKENILHVSENVVFTDINSILRYLARVATTAGLYGSNLLEHTEIDHWLEFSATKLSSCNLFTSAINELNHCLSLRTYLVGNSLSLADLCVWATLKGNAAWQEQLKQNKAPVHVKRWFGFLEAQQAFQSVGTKWNVSATKAKAIPEKKQDVGKFVELPGAEMGKVTVRFPPEASGYLHIGHAKAALLNQHYQVNFKGKLIMRFDDTNPEKEKEDFEKVILEDVAMLHIKPDQFTYTSDHFETIMKYAEKLIQEGKAYVDDTPAEQMKAEREQRIESKHRKNSIEKNLQMWEEMKQGSQFGQSCCLRAKIDMSSNNGCMRDPTLYRCKIQPHPRTGNKYNVYPTYDFACPIVDSIEGVTHALRTTEYHDRDEQFYWIIEALGIRKPYIWEYSRLNLNNTVLSKRKLTWFVNEGLVDGWDDPRFPTVRGVLRRGMTVEGLKQFIAAQGSSRSIVNMEWDKIWAFNKKVIDPVAPRYVALLKKEVIPVNIPEAQEEMKEVAKHPKNPDVGLKPVWYSPKVFIEGADAETLSEGEMVTFINWGNINITKINKNADGKIVSLDAKLNLENKDYKKTTKITWLAETAHALPVPAICVTYEHLITKPVLGKDEDFKQYVNKNSKHEELMLGDPCLKDLKKGDIIQLQRRGFFICDQPYEPVSPYSCKEAPCVLIYIPDGHTKEMPTSGSREKTKVETTKNEPTTPFKERPGPSLDNTCAPSEDSLVLYNRVAAQGDVVRELKAKKAAKEDVDAAVKQLLALKAEYKEKTGQEYKPGNPPAVVQDVSSKSSASTVDSKSLYEEIAAQGEVVRKLKAEKAPKAKVNEAVECLLSLKAQYKEKTGKEYIPGQPPLSQSSDSTNSSEPSGPETPEAKVLFDKVASQGEVVRKLKAEKASKDQVDTAVQELLQLKAQYKSLTGVEYKPVSVTGAEDKDKKKKEKENKSEKQNKPQKQSDGQKKDSFKSQGSGLSSSGAGEGQGPKKQTRLGLEAKKEENLADWYSQVITKSELIEYYDVSGCYILRPWAYSIWESIKDFFDAEIKKLGVENCYFPMFVSQGALEKEKTHIADFAPEVAWVTRSGKTELAEPIAVRPTSETVMYPAYAKWVQSHRDLPIRLNQWCNVVRWEFKHPQPFLRTREFLWQEGHSAFATFEEAAEEVLQILDLYAQVYEELLAIPVVKGRKTEKEKFAGGDYTTTLEVFISASGRAIQGATSHHLGQNFSKMFEIIFEDPKTPGEKQFAYQNSWGLTTRTIGVMTMVHGDNMGLVLPPRVASVQVVVIPCGITNALSEEDREALIAKCNDYRKRLLSVNIRVRVDLRDNYSPGWKFNHWELKGVPIRLEVGPRDMKSCQFVAVRRDTGEKLTVADNEAETKLHALLEDIHVNLFTRASKDLKTHMVVANTMEDFQQMLDSGKIVQIPFCGEIDCEDWIKKTTARDQDLEPGAPSMGAKSLCIPFKPLCELQPGAKCICGRNPAKYYTLFGRSY

SEQ ID NO: 56 - protein, 1518 aa, Artificial Sequence
  EPRS XP_005981362.1
MATLCLTVNSGDPPLGALLAVEHVKDNVSISVEEGKENILHVSENVVFTDINSILRYLARIATTAGLYGSNLLEHTEIDHWLEFSATKLSSCDLFTSAVNELNHCLSLRTYLVGNSLSLADLCVWATLKGNAAWQEQLGQNKAPVHVKRWFGFLEAQQAFQSVGTKWNVSATKAKVVPEKKQDVGKFVELPGAEMGKVTVRFPPEASGYLHIGHAKAALLNQHYQVNFKGKLIMRFDDTNPEKEKEDFEKVILEDVAMLHIKPDQFTYTSDHFETIMKYAEKLIQEGKAYVDDTPAEQMKAEREQRIESKHRKNSVEKNLQMWEEMKKGSQFGQSCCLRAKIDMSSNNGCMRDPTLYRCKIQPHPRTGNKYNVYPTYDFACPIVDSIEGVTHALRTTEYHDRDEQFYWIIEALGIRKPFIWEYSRLNLNNTVLSKRKLTWFVNEGLVDGWDDPRFPTVRGVLRRGMTVEGLKQFIAAQGSSRSVVNMEWDKIWAFNKKLRALCKKVIDPVAPRYVALLKKEVVPVNVPEAQEEMKEVAKHPKNPDVGLKPVWYSSKVFIEGADAETLSEGEMVTFINWGNINITKIHKNAEGKIVSLDAKLNLENKDYKKTTKITWLAETEHALPVPAICVTYEHLITKPVLGKDEDFKQYVNKNSKHEELMLGDPCLKDLKKGDIIQLQRRGFFICDQPYEPISPYSCIEAPCILIYIPDGHTKEMPTSGSKEKTKVETTKNEASTPLKTGSAPSLSTCATSEDSLVLYNRVAAQGDVVRELKAKKATKEDIDAAVKQLLALKAEYKEKTGQEYKPGNPPAAAGQNISSKSSSNIVESKSLYDEVAAQGEVVRKLKAEKAPKAKVNEAVECLLSLKAQYKEKTGKEYVPGQPPSSQSSDSSPPRSSEPSGPETPEAKLLFDKVASQGEVVRKLKAEKASKDQVDTAVQDLLQLKAQYKSLTGVDYKPISATGAEEKDKKKKEKENKSEKQNKPQKQNDTQKKDSSKNQGSGLSPNGAGEGQGPKKQTRLGLEARKEDSLADWYSQVITKSEMIEYHDVSGCYILRPWAYSIWESIKDFFDAEIKKLGVENCYFPMFVSQGALEKEKTHIADFAPEVAWVTRSGKTELAEPIAIRPTSETVMYPAYAKWVQSHRDLPIKLNQWCNVVRWEFKHPQPFLRTREFLWQEGHSAFATFEEAAEEVLQILDLYAQVYEELLAIPVVKGRKTEKEKFAGGDYTTTVEAFISASGRAIQGATSHHLGQNFSKMFEIVFEDPKTAGEKQLAYQNSWGLTTRTIGVMTMVHGDNVGLVLPPRVACVQVVVIPCGITNALSEEDRDALLAKCNDYRRRLLSVNIRVRVDLRDNYSPGWKFNHWELKGVPIRLEVGPRDMKNCQFVAVRRDTGEKLTVAENEAETKLHAILEDIHINLFTRASEDLKTHMVVANTMEDFQKELDSGKIAQIPFCGEIDCEDWIKKTTARDQDLEPGAPSMGAKSLCIPFKPLCELPPGAKCVCGKNPAKYYTLFGRSY

SEQ ID NO: 57 - protein, 1512 aa, Artificial Sequence
  EPRS XP_004271072.1
MATLCLTVNSGDPPLGALLAVEHVKDNVSISVEEGKENILHVSENVVFTDINSILRYLARIATTAGLYGSNLLEHTEIDHWLEFSATKLSSCDLFTSAINELSHCLSLRTYLVGNSLSLADLCVWATLKGNAAWQEQLEQNKAPVHVKRWFGFLEAQQAFQSVGTKWNVSTSKAKVVPEKKQDVGKFVELPGAEMGKVTVRFPPEASGYLHIGHAKAALLNQHYQVNFKGKLIMRFDDTNPEKEKEDFEKVILEDVAMLHIKPDQFTYTSDHFETIMKYAEKLIQEGKAYVDDTPAEQMKAEREQRIESKHRKNSVEKNLQMWEEMKKGSQFGQSCCLRAKIDMSSNNGCMRDPTLYRCKIQPHPRTGNKYNVYPTYDFACPIVDSIEGVTHALRTTEYHDRDEQFYWIIEALGLRKPYIWEYSRLNLNNTVLSKRKLTWFVNEGLVDGWDDPRFPTVRGVLRRGMTVEGLKQFIAAQGSSRSVVNMEWDKIWAFNKKVIDPVAPRYVALLKKEVIPVDIPEAQEEMKEVARHPKNPDVGLKPVWYSPKVFIEGADAETLSEGETVTFINWGNINITKIHRNAEGKIVSLDAKLNLENKDYKKTTKITWLAETERALPVPAICVTYEHLITKPVLGKDEDFKQYVNKNSKHEELMLGDPCLKDLKKGDIIQLQRRGFFICDQPYEPISPYSCIEAPCILIYIPDGHTKEMPTSGSKEKTKVETTKNEAATPLKTMSAPSLNNTCATSEDSLVLYNRVAVQGDVVRELKAKKAAKEDIDAAVKQLLALKAEYKEKTGQEYKLGNPPAATVQNVSSTSSSDILESKSLYDEVAAQGEAVRKLKAEKAPKAKVNEAVECLLSLKAQYKEKTGKEYVPGQPPSSQSSDSSPSRSSEPRGPETPEAKSLFDKVATQGEVVRKLKAEKASKDQVDTAVQELLQLKAQYKSLTGVDYKPVSANGAEEKDKKKKEKENKSEKQNKTQKQNDGQKKDSSKNQGSGLSSSGPGEGQGPKKQTRLGLEAKKEENLADWYSQVITKSEMIEYYDVSGCYILRPWAYSIWESIKDFFDAEIKKLGVENCYFPMFVSQGALEKEKTHVADFAPEVAWVTRSGKTELAEPIAVRPTSETVMYPAYAKWVQSHRDLPIRLNQWCNVVRWEFKHPQPFLRTREFLWQEGHSAFATFEEAAEEVLQILDLYAKVYEELLAIPVVKGRKTEKEKFAGGDYTTTVEAFISASGRAIQGATSHHLGQNFSKMFEIIFEDPKTPGEKQFAYQNSWGLTTRTIGVMTMVHGDNMGLVLPPRVACVQVVVIPCGITNALSEEDRDALIAKCNDYRSRLLSVNIRVRADLRDNYSPGWKFNHWELKGVPIRLEVGPRDMKSCQFVAVRRDTGEKLTVAENEAETKLHAILEDIHVNLFTRASEDLKTHMVVANTMEDFQKELDSGKIAQIPFCGEIDCEDWIKKTTARDQDLEPGAPSMGAKSLCIPFRPLCELQPGAQCVCGKNPAKYYTLFGRSY

SEQ ID NO: 58 - protein, 1520 aa, Artificial Sequence
  EPRS XP_008053499.1
MATLCLTVNSGDPPLGALLAIEHVKDDVSISVEEGKENILRVSENVVFTDVNSILRYLARVATTVGLYGSNLMEHTEIDHWLEFSATKLSSCNLFTSAISELNHCLSLRTYLVGNSLSLADLCVWATLQGNAAWQEQLKQNKAPVHVKRWFGFLEAQQAFQSVGTKWDISTTKAKVTPEKKQDVGKFIELPGAEMGKVTVRFPPEASGYLHIGHAKAALLNQHYQVNFKGKLIMRFDDTNPEKEKEDFEKVILEDVAMLHIKPDQFTYTSDHFETIMKYAEKLIQEGKAYVDDTPAEQMKVEREQRVESKHRKNSVEKNLQMWEEMKKGSQFGQSCCLRAKIDMSSNNGCMRDPTLYRCKIQPHPRTGNKYNVYPTYDFACPIVDSIEGVTHALRTTEYHDRDEQFYWIIEALGIRKPYIWEYSRLNLNNTVLSKRKLTWFVNEGLVDGWDDPRFPTVRGVLRRGMTVEGLKQFIAAQGSSRSVVNMEWDKIWAFNKKLRALCKKVIDPVAPRYVALLKKEVIPVNVPEAQEEMKEVAKHPKNLDIGLKPVWYSPKIFIEGADAETFSEGEMVTFINWGNINITKIHKNTGGKIVSLDAKLNLENKDYKKTTKITWLAETTHALPIPAICVTYEHLITKPVLGKDEDFKQYVNKNSKHEELMLGDPCLKDLKKGDIIQLQRRGFFICDQPYEPVSPYSCKESPCILIYIPDGHTKEMPTSGSKEKTKAETIKNEKTSASFKERPAPTLNNPCAISGDSLALYNRVAVQGDVVRELKAKKAAKEDIDAAVKQLLSLKAEYKERTSQEYKPGNPPAGIAQNISFKSSASILESKSLYDEVAAQGEVVRKLKAEKTSKAKINEAVEYLLSLKAQYKEKTGKEYIPGQPPLSQSSDSSPSRTSEPTDPETPEAKVLFDKVATQGEVVRKLKAEKASKDQVDTAVQELLKLKALYKSLTGVDYKPVSATGAEDKDKKKKEKENKSEKQNKAQKQNDGQRKDSSKNQGGGLSSSGAGEGQGPKKQTRLGLEAKKEENLAEWYSQVITKSEMIEYYDISGCYILRPWAYSIWESIKEFFDAGIKKLGVENCYFPMFVSQGALEKEKTHVADFAPEVAWVTRSGKTELAEPIAIRPTSETVMYPAYAKWVQSHRDLPIRLNQWCNVVRWEFKHPQPFLRTREFLWQEGHSAFATVEEAAEEVLQILDLYAQVYEDLLAIPVVKGRKTEKEKFAGGDYTTTLEAFISASGRAIQGATSHHLGQNFSKMCEIVFEDPKTPGEKQFAYQNSWGLTTRTIGVMTMVHGDNMGLVLPPRVACVQVVIIPCGITNALSEEDREALIAKCNDYRRRLLNVNIRVKVDLRDNYSPGWKFNHWELKGVPIRLEVGPRDMKSFQFVAVRRDTGEKLTVTENEAEIKLQAILEDIHVTLFTRASEDLKTHMVVANTMEEFQKILDSGKIAQIPFCGEIDCEDWIKKTTARDQDIEPGAPSMGAKSLCIPFKPLCELQPGAKCICGKNPAKYYTLFGRSY

SEQ ID NO: 59 - protein, 1566 aa, Artificial Sequence
  EPRS XP_004415195.1
MTHRVVREDGGSHDAGEGRRLRQRQAHAHVAASCFRRVRRGSDGQAGALTGGRRPAEMATLCLTVNAGDPPLGALLAVEHVKDNVSISVEEGKENILFVSENVVFTDINSILRYLARVAATAGLYGSNLLEHTEIDHWLEFSATKLSSCNLFTSAINELNHCLSLRTYLVGNSLSLADLCVWATLKGSAAWQEQLKQNKAPVHVKRWFGFLEAQQAFQSVGTKWNVSATKAKVTPEKKQDVGKFVELPGAEMGKVTVRFPPEASGYLHIGHAKAALLNQHYQVNFKGKLIMRFDDTNPEKEKEDFEKVILEDVAMLHIKPDQFTYTSDHFETIMKYAETLIQEGKAYVDDTPAEQMKAEREQRIESKHRKNSIEKNLQMWEEMKKGSQFGQSCCLRAKIDMSSNNGCMRDPTLYRCKIQPHPRTGNKYNVYPTYDFACPIVDSIEGVTHALRTTEYHDRDEQFYWIIEALGIRKPYIWEYSRLNLNNTVLSKRKLTWFVNEGLVDGWDDPRFPTVRGVLRRGMTVEGLKQFIAAQGSSRSVVNMEWDKIWAFNKKVIDPVAPRYVALLKKEVIPVNIPEAQEEMKEVAKHPKNPDVGLKPVWYSPKVFIEGADAETLSEGEMVTFINWGNINITKINKNADGKIVSLDAKLNLENKDYKKTTKITWLAETAHALPIPVICVTYEHLITKPVLGKDEDFKQYVNKNSKHEELMLGDPCLKDLKKGDIIQLQRRGFFICDQPYEPVSPYSCKEAPCVLIYVPDGHTKEMPTSGSREKTKVETTKNEPTAPFKERPGPSLDNTCASSEDSLVLYNRVAAQGDVVRELKAKKAAKEDIDSAVKQLLALKAEYKEKTGQEYKPGNPPAVVQNVSSISSASIVDSRSLYDEVAAQGEVVRKLKAEKAPKAKVNEAVECLLSLKAQYKEKTGKEYIPGQPPLSQSSDSTNSSEASGPETPESKVLFDKVASQGEVVRKLKAEKASKDQVDTAVQELLQLKAQYKSLTGVEYKPVSATGAEDKDKKKKEKENKSEKQNKPQKQSDGQKKDSFKSQGSGLSSSGAGEGQGPKKQTRLGLEAKKEENLADWYSQVITKSELIEYYDVSGCYILRPWAYSIWESIKEFIDAEIKKLGVENCYFPMFVSQGALEKEKTHIADFAPEVAWVTRSGKTELAEPIAVRPTSETVMYPAYAKWVQSHRDLPIRLNQWCNVVRWEFKHPQPFLRTREFLWQEGHSAFATFEEAAEEVLQILDLYAQVYEELLAIPVVKGRKTEKEKFAGGDYTTTLEVFISASGRAIQGATSHHLGQNFSKMFEIIFEDPKTPGEKQFAYQNSWGLTTRTIGVMTMVHGDNMGLVLPPRVASVQVMVIPCGITNALSEEDREALIAKCNDYRRRLLSVNIRVRVDLRDNYSPGWKFNHWELKGVPIRLEVGPRDMKSCQFVAVRRDTGEKLTVADNEAETKLHALLEDIHVNLFTRASEDLKTHMVVANTMEDFQKMLDSGKIAQIPFCGEIDCEDWIKKTTARDQDLEPGAPSMGAKSLCVPFKPLCELQPGARCVCGRNAAKYYTLFGRSY

SEQ ID NO: 60 - protein, 1508 aa, Artificial Sequence
  EPRS XP_004324147.1
MATLCLTVNSGDPPLGALLAVEHVKDNVSISVEEGKENILHVSENVVFTDINSILRYLARIATTAGLYGSNLLEHTEIDHWLEFSATKLSSCDLFTSAINELSHCLSLRTYLVGNSLSLADLCVWATLKGNAAWQEQLEQNKAPVHVKRWFGFLEAQQAFQSVGTKWNVSTSKAKVVPEKKQDVGKFVELPGAEMGKVTVRFPPEASGYLHIGHAKAALLNQHYQVNFKGKLIMRFDDTNPEKEKEDFEKVILEDVAMLHIKPDQFTYTSDHFETIMKYAEKLIQEGKAYVDDTPAEQMKAEREQRIESKQRKNSVEKNLQMWEEMKKGSQFGQSCCLRAKIDMSSNNGCMRDPTLYRCKIQPHPRTGNKYNVYPTYDFACPIVDSIEGVTHALRTTEYHDRDEQFYWIIEALGLRKPYIWEYSRLNLNNTVLSKRKLTWFVNEGLVDGWDDPRFPTVRGVLRRGMTVEGLKQFIAAQGSSRSVVNMEWDKIWAFNKKVIDPVAPRYVALLKKEVIPVDIPEAQEEMKEVARHPKNPDVGLKPVWYSPKVFIEGADAETLSEGETVTFINWGNINITKIHRNAEGKIVSLDAKLNLENKDYKKTTKITWLAETERALPVPAICVTYEHLITKPVLGKDEDFKQYVNKNSKHEELMLGDPCLKDLKKGDIIQLQRRGFFICDQPYEPISPYSCIEAPCILIYIPDGHTKEMPTSGSKEKTKVETTKNEAATPLKTMSAPSLNNTCATSEDSLVLYNRVAVQGDVVRELKAKKAAKEDIDAAVKQLLALKAEYKEKTGQEYKLGNPPAATVQNVSSTSSSDILESKSLYDEVAAQGEVVRKLKAEKAPKAKVNEAVECLLSLKAQYKEKTGKEYVPGQPPSSQSSDSSPSRSSEPRGPETPEAKSLFDKVATQGEVVRKLKAEKASKDQVDTAVQELLQLKAQYKSLTGVDYKPVSANGAEEKDKKKKEKENKSEKQNKTQKQNDGQKKDSSKNQGSGLSSSGPGEGQGPKKQTRLGLEAKKEENLADWYSQVITKSEMIEYYDVSGCYILRPWAYSIWESIKDFFDAEIKKLGVENCYFPMFVSQGALEKEKTHVADFAPEVAWVTRSGKTELAEPIAVRPTSETVMYPAYAKWVQSHRDLPIRLNQWCNVVRWEFKHPQPFLRTREFLWQEGHSAFATFEEAAEEVLQILDLYAKVYEELLAIPVVKGRKTEKEKFAGGDYTTTVEAFISASGRAIQGATSHHLGQNFSKMFEIIFEDPKTPGEKQFAYQNSWGLTTRTIGVMTMVHGDNMGLVLPPRVACVQVVVIPCGITNALSEEDRDALIAKCNDYRRRLLSVNIRVRADLRDNYSPGWKFNHWELKGVPVRLEVGPRDMKSCQFVAVRRDTGEKLTVAENEAETKLHAILEDIHVNLFTRASEDLKTHMVVANTMEDFQKELDSGKIAQIPFCGEIDCEDWIKKTTARDQDLEPGAPSMGAKSLCIPFRPLCELQPGAKKVCGKNPAKYFTSK

SEQ ID NO: 61 - protein, 1495 aa, Artificial Sequence
  EPRS EFB20321.1
VGALLAVEHVKDNVSISVEEGKENILHVSENVVFTDINSILRYLARVATTAGLYGSNLLEHTEIDHWLEFSATKLSSCNLFTSAINELNHCLSLRTYLVGNSLSLADLCVWATLKGNAAWQEQLKQNKAPVHVKRWFGFLEAQQAFQSVGTKWNVSATKAKAIPEKKQDVGKFVELPGAEMGKVTVRFPPEASGYLHIGHAKAALLNQHYQVNFKGKLIMRFDDTNPEKEKEDFEKVILEDVAMLHIKPDQFTYTSDHFETIMKYAEKLIQEGKAYVDDTPAEQMKAEREQRIESKHRKNSIEKNLQMWEEMKQGSQFGQSCCLRAKIDMSSNNGCMRDPTLYRCKIQPHPRTGNKYNVYPTYDFACPIVDSIEGVTHALRTTEYHDRDEQFYWIIEALGIRKPYIWEYSRLNLNNTVLSKRKLTWFVNEGLVDGWDDPRFPTVRGVLRRGMTVEGLKQFIAAQGSSRSIVNMEWDKIWAFNKKVIDPVAPRYVALLKKEVIPVNIPEAQEEMKEVAKHPKNPDVGLKPVWYSPKVFIEGADAETLSEGEMVTFINWGNINITKINKNADGKIVSLDAKLNLENKDYKKTTKITWLAETAHALPVPAICVTYEHLITKPVLGKDEDFKQYVNKNSKHEELMLGDPCLKDLKKGDIIQLQRRGFFICDQPYEPVSPYSCKEAPCVLIYIPDGHTKEMPTSGSREKTKVETTKNEPTTPFKERPGPSLDNTCAPSEDSLVLYNRVAAQGDVVRELKAKKAAKEDVDAAVKQLLALKAEYKEKTGQEYKPGNPPAVVQDVSSKSSASTVDSKSLYEEIAAQGEVVRKLKAEKAPKAKVNEAVECLLSLKAQYKEKTGKEYIPGQPPLSQSSDSTNSSEPSGPETPEAKVLFDKVASQGEVVRKLKAEKASKDQVDTAVQELLQLKAQYKSLTGVEYKPVSVTGAEDKDKKKKEKENKSEKQNKPQKQSDGQKKDSFKSQGSGLSSSGAGEGQGPKKQTRLGLEAKKEENLADWYSQVITKSELIEYYDVSGCYILRPWAYSIWESIKDFFDAEIKKLGVENCYFPMFVSQGALEKEKTHIADFAPEVAWVTRSGKTELAEPIAVRPTSETVMYPAYAKWVQSHRDLPIRLNQWCNVVRWEFKHPQPFLRTREFLWQEGHSAFATFEEAAEEVLQILDLYAQVYEELLAIPVVKGRKTEKEKFAGGDYTTTLEVFISASGRAIQGATSHHLGQNFSKMFEIIFEDPKTPGEKQFAYQNSWGLTTRTIGVMTMVHGDNMGLVLPPRVASVQVVVIPCGITNALSEEDREALIAKCNDYRKRLLSVNIRVRVDLRDNYSPGWKFNHWELKGVPIRLEVGPRDMKSCQFVAVRRDTGEKLTVADNEAETKLHALLEDIHVNLFTRASKDLKTHMVVANTMEDFQQMLDSGKIVQIPFCGEIDCEDWIKKTTARDQDLEPGAPSMGAKSLCIPFKPLCELQPGAKCICGRNPAKYYTLFGRSY

SEQ ID NO: 62 - protein, 1508 aa, Artificial Sequence
  EPRS XP_004751515.1
MATLCLTVNAGDPPLGALLAVEHVKDNVSISVEEGKENILHVSENVVFTDVNSILRYLARVATTAGLYGSNLLEHTEIDHWLEFSATKLSSCSLFTSAINELNHCLSLRTYLVGNSLSLADLCVWATLKGSAAWQEQLKQNKAPVHLKRWFGFLEAQQAFQSVGTKWNVSATKAKAIPEKKQDVGKFVELPGAEMGKVTVRFPPEASGYLHIGHAKAALLNQHYQVNFKGKLIMRFDDTNPEKEKEDFEKVILEDVAMLHIKPDQFTYTSDHFETIMKYAEKLIQEGKAYVDDTPAEQMKAEREQRIESKHRKNSVEKNLQMWEEMKKGSQFGQSCCLRAKMDMSSNNGCMRDPTLYRCKIQPHPRTGNKYNVYPTYDFACPIVDSIEGVTHALRTTEYHDRDEQFYWIIEALGIRKPYIWEYSRLNLNNTVLSKRKLTWFVNEGLVDGWDDPRFPTVRGVLRRGMTVEGLKQFIAAQGSSRSVVNMEWDKIWAFNKKVIDPVAPRYVALLKKDVVPVNIPEAQEEMKEVAKHPKNPDVGLKPVWYSPKVFIEGADAETLSEGEMVTFINWGNINITKINKSADGKIVSLDAKLNLENKDYKKTTKITWLAETARALPIPAICVTYEHLITKPVLGKDEDFKQYVNKNSKHEELMLGDPCLKDLKKGDIIQLQRRGFFICDQPYEPVSPYSCKEAPCVLIYIPDGHTKEMPTSGSREKTKVETTKNEPSTPRKERPGPLDNTCAPSEDSLVLYNRVAAQGDVVRELKAKKAAKEDIDAAVKQLLALKAEYKEKTGQEYKPGNPPAVVQNVSSGSSRSVVESKSLYDEVAAQGEVVRKLKAEKAPKAKINEAVECLLSLKAQYKEKTGKEYIPGQPPLSQSSDSTNSSEHSSPETPEAKVLFDKVASQGEVVRKLKAEKASKDQVDSAVQELLQLKAQYKSLTGVEYKPVSATGAEDKDKKKKEKENKSEKQNKPQKQSDGQKKESFKSQGSGLSSSGAGEGQGPKKQTRLGLEAKKEENLADWYSQVITKSELIEYYDVSGCYILRPWAYSIWESIKDFFDAEIKKLGVENCYFPMFVSQGALEKEKTHIADFAPEVAWVTRSGKTELAEPIAVRPTSETVMYPAYAKWVQSHRDLPIRLNQWCNVVRWEFKHPQPFLRTREFLWQEGHSAFATFEEAAEEVLQILDLYAQVYEELLAIPVVKGRKTEKEKFAGGDYTTTLEVFISASGRAIQGATSHHLGQNFSRMFEIVFEDPKTPGEKQFAYQNSWGLTTRTIGVMTMVHGDNMGLVLPPRVASVQVMVIPCGITNALSEEDREALIAKCNDYRRRLLSVNIRVRVDLRDNYSPGWKFNHWELKGVPIRLEVGPRDMKSCQFVAVRRDTGEKLTVADNEAETKLHALLEDIHVNLFTRASEDLKTHMVVANTMEDFQKMLDSGKIAQIPFCGEIDCEDWIKKTTARDQDLEPGAPSMGAKSLCIPFQPLCELQPGARCICGRNPAKYYTLFGRSY

SEQ ID NO: 63 - protein, 1522 aa, Artificial Sequence
  EPRS XP_008683957.1
  misc_feature (50): Xaa is any amino acid
METISQLALLSLRSVVKSSSLRRLPRRRESPRALLAVEHVKDNVSISVEXNILHVSESVVFTDINSILRYLARVAATAGLYGSNLLEHTEIDHWLEFSATKLSSCNLFTSAINELNHCLSLRTYLVGNSLSLADLCVWATLKGNAAWQEQLKQNKAPVHVKRWFGFLEAQQAFQSVGTKWNVSASKAKAIPEKKQDVGKFVELPGAEMGKVTVRFPPEASGYLHIGHAKAALLNQHYQVNFKGKLIMRFDDTNPEKEKEDFEKVILEDVAMLHIKPDQFTYTSDHFETIMKYAEKLIQEGKAYVDDTPAEQMKAEREQRIESEHRKNSIEKNLQMWEEMKQGSQFGQSCCLRAKIDMSSNNGCMRDPTLYRCKIQPHPRTGNKYNVYPTYDFACPIVDSIEGVTHALRTTEYHDRDEQFYWIIEALGIRKPYIWEYSRLNLNNTVLSKRKLTWFVNEGLVDGWDDPRFPTVRGVLRRGMTVEGLKQFIAAQGSSRSIVNMEWDKIWAFNKKVIDPVAPRYVALLKKEVIPVNIPEAQEEMKEVAKHPKNPDVGLKPVWYSPKVFIEGADAETLSEGEMVTFINWGNINITKINKNADGKIVSLDAKLNLENKDYKKTTKITWLAETAHALPVPAICVTYEHLITKPVLGKDEDFKQYVNKNSKHEELMLGDPCLKDLKKGDIIQLQRRGFFICDQPYEPVSPYSCKEAPCVLIYIPDGHTKEMPTSGSREKTKVETTKNEPTAPFKERPGPSLDNTCAPSEDSLVLYNRVAAQGDVVRELKAKKAAKEDVDAAVKQLLALKAEYKEKTGQEYKPGNPPAVVQDVSSKSSASTVESKSLYDEVAAQGEVVRKLKAEKAPKAKVNEAVECLLSLKAQYKEKTGKEYIPGQPPLSQSSDSTNSSEPSGPETPEAKVLFDKVASQGEVVRKLKAEKASKDQVDTAVQELLQLKAQYKSLTGVEYKPVSATGAEDKDKKKKEKENKSEKQNKPQKQSDGQKKDSFKSQGSGLSSSGAGEGQGPKKQTRLGLEAKKEENLADWYSQVITKSELIEYYDVSGCYILRPWAYSIWESIKDFFDAEIKKLGVENCYFPMFVSQGALEKEKTHIADFAPEVAWVTRSGKTELAEPIAVRPTSETVMYPAYAKWVQSHRDLPIRLNQWCNVVRWEFKHPQPFLRTREFLWQEGHSAFATFEEAAEEVLQILDLYAQVYEELLAIPVVKGRKTEKEKFAGGDYTTTLEVFISASGRAIQGATSHHLGQNFSKMFEIIFEDPKTPGEKQFAYQNSWGLTTRTIGVMTMVHGDNMGLVLPPRVASVQVVVIPCGITNALSEEDREALIAKCNDYRKRLLSVSIRVRVDLRDNYSPGWKFNHWELKGVPIRLEVGPRDMKSCQFVAVRRDTGEKLTVADNEAETKLHSLLEDIHVNLFTRASKDLKTHMVVANTMEDFQQLLDSGKIVQIPFCGEIDCEDWIKKTTARDQDLEPGAPSMGAKSLCIPFKPLCELQPGAKCICGRNPAKYYTLFGRSY

SEQ ID NO: 64 - protein, 1511 aa, Artificial Sequence
  EPRS XP_003999559.1
  misc_feature (207): Xaa is any amino acid
MATLCLTVNAGDPPLGALLAVEHVKDNVSISVEEGKENILHVSENVVFTDINSILRYLARVATTARLYGSNLLEHTEIDHWLEFSATKLSSCNLFTSAINELNHCLSLRTYLVGNSLSLADLCVWATLKGNPAWQEQLKQNKTPVHVKRWFGFLEAHQAFQSVGTKWNVSTTKAKVTSEKKQDVGKFVELPGAEMGKVTVRFPPEAXSYLHIGHAKAALLNQHYQVNFKGKLIMRFDDTNPEKEKEDFEKVILEDVAMLHIKPDQFTYTSDHFETIMKYAEKLIQEGKAYVDDTPAEQMKAEREQRIESKHRKNSIEKNLQMWEEMKKGSQFGQSCCLRAKIDMSSNNGCMRDPTLYRCKIQPHPRTGNKYNVYPTYDFACPIVDSIEGVTHALRTTEYHDRDEQFYWIIEALGIRKPYIWEYSRLNLNNTVLSKRKLTWFVNEGLVDGWDDPRFPTVRGVLRRGMTVEGLKQFIAAQGSSRSVVNMEWDKIWAFNKKVIDPVAPRYVALLKKEVIPVNVPEAQEEMKEVAKHPKNPDVGLKPVWYSPKVFIEGADAETLSEGEMVTFINWGNINIIKINKNADGKIVSLDAKLNLENKDYKKTTKITWLAETTQALPVPAVCVTYEHLITKPVLGKDEDFKQYVNKNSKHEELMLGDPCLKDLKKGDIIQLQRRGFFICDQPYEPVSPYSCKEAPCVLIYIPDGHTKEMPTSGSKEKTKVETTKSEPTIPFKERPGPSLDNTCATFEDSLVLYNRVAAQGDVVRELKAKKAAKEDIDAAVKQLLALKAEYKEKTGQEYKPGNPATVVQNVSSVSVASPLESKSLYDEVAAQGEVVRKLKAEKAPKAKVNEAVECLLSLKAQYKEKTGKEYIPGQPPLSQSSDSSATNSSEPRGPETPEAKVLFDKVASQGEVVRKLKAEKASKEQVDTAVQELLQLKAQYRSLTGVEYKPVSATGAEDKDKRKKEKENKSEKQNKPQKQSDGPKKDSLKNQGSGLSSSGAGEGQGPKKQTRLGLEAKKEENLADWYSQVITKSEMIEYYDVSGCYILRPWAYSIWESIKDFFDAEIKKLGVENCYFPMFVSQGALEKEKTHVADFAPEVAWVTRSGKTELAEPIAVRPTSETVMYPAYAKWVQSHRDLPIRLNQWCNVVRWEFKHPQPFLRTREFLWQEGHSAFATFEEAAEEVLQILDLYAQVYEELLAIPVVKGRKTEKEKFAGGDYTTTVEAFISASGRAIQGATSHHLGQNFSKMFEIIFEDPKTPGEKQFAYQNSWGLTTRTIGVMTMVHGDNMGLVLPPRVACVQVVVIPCGITNALSEEDRDALIAKCNDYRRRLLSVNIRVRVDLRDNYSPGWKFNHWELKGVPIRLEVGPRDMKSHQFVAVRRDTGEKLTFADNEAETKLQAVLEDIHVNLFTKASEDLKTHMVVANTMEDFQKMLDSGKIAQIPFCGEIDCEDWIKKTTARDQDLEPGAPSMGAKSLCIPFTPLCELQPGARCVCGKNPAKFYTLFGRSY

SEQ ID NO: 65 - protein, 1571 aa, Artificial Sequence
  EPRS XP_007072912.1
MTHHGVRGDGGSHDAGGGRRLRERDGEACRLPETVHGVSSAALIFRPWRVDLLPETVYSGVEGGVFIKKNLFMSLFLGALLAVEHVKDNVSISVEEGNILHVSENVVFTDINSILRYLARVATTARLYGSNLLEHTEIDHWLEFSATKLSSCNLFTSAINELNHCLSLRTYLVGNSLSLADLCVWATLKGNPAWQEQLKQSKTPVHVKRWFGFLEAHQAFQSVGAKWNVSTTKAKVTSEKKQDVGKFVELPGAEMGKVTVRFPPEASGYLHIGHAKAALLNQHYQVNFKGKLIMRFDDTNPEKEKEDFEKVILEDVAMLHIKPDQFTYTSDHFETIMKYAEKLIQEGKAYVDDTPAEQMKAEREQRIESKHRKNSIEKNLQMWEEMKKGSQFGQSCCLRAKIDMSSNNGCMRDPTLYRCKIQPHPRTGNKYNVYPTYDFACPIVDSIEGVTHALRTTEYHDRDEQFYWIIEALGIRKPYIWEYSRLNLNNTVLSKRKLTWFVNEGLVDGWDDPRFPTVRGVLRRGMTVEGLKQFIAAQGSSRSVVNMEWDKIWAFNKKVIDPVAPRYVALLKKEVIPVNVPEAQEEMKEVAKHPKNPDVGLKPVWYSPKVFIEGADAETLSEGEMVTFINWGNINIIKINKNADGKIVSLDAKLNLENKDYKKTTKITWLAETAQALPIPAVCVTYEHLITKPVLGKDEDFKQYVNKNSKHEELMLGDPCLKDLKKGDIIQLQRRGFFICDQPYEPVSPYSCKEAPCVLIYIPDGHTKEMPTSGSKEKTKVETTKNEPTIPFKERPGPSLDNTCATFEDSLVLYNRVAAQGDVVRELKAKKAAKEDIDAAVKQLLALKAEYKEKTGQEYKPGNPAALVQNVSSVSVARPLESKSLYDEVAAQGEVVRKLKAEKAPKAKVNEAVECLLSLKAQYKEKTGKEYIPGQPPLSQSSDSSATNSSEPRGPETPEAKVLFDKVASQGEVVRKLKAEKASKEQVDTAVQELLRLKAQYTSLTGVEYQPVSATGAEDKDKRKKEKENKSEKQNKPQKQSDGPKKDSLKNRGSGLSSSGAGEGQGPKRQTRLGLEAKKEENLADWYSQVITKSEMIEYYDVSGCYILRPWAYSIWESIKDFFDAEIKKLGVENCYFPMFVSQGALEKEKTHVADFAPEVAWVTRSGKTELAEPIAVRPTSETVMYPAYAKWVQSHRDLPIRLNQWCNVVRWEFKHPQPFLRTREFLWQEGHSAFATFEEAAEEVLQILDLYAQVYEELLAIPVVKGRKTEKEKFAGGDYTTTVEAFISASGRAIQGATSHHLGQNFSKMFEIIFEDPKTPGEKQFAYQNSWGLTTRTIGVMTMVHGDNMGLVLPPRVACVQVVVIPCGITNALSEEDRDALLAKCNDYRRRLLSVNIRVRVDLRDNYSPGWKFNHWELKGVPIRLEVGPRDMKSRQFVAVRRDTGEKLTFADNEAETKLQAVLEDIHVNLFTKASEDLKTHMVVANTMEDFQKMLDSGKIAQIPFCGEIDCEDWIKKTTARDQDLEPGAPSMGAKSLCIPFTPLCELQPGARCVCGKNPAKFYTLFGRSY

SEQ ID NO: 66 - protein, 1438 aa, Artificial Sequence
  EPRS XP_008586040.1
MEHTEIDHWLEFSATKLSSCSLFTSAINELNHCLSLRTYLVGNMLSLADLCVWATLKGNAAWQEQLKQNKSLVHAKRWFGFLEAQQTFQSVGTKWDVSTTTTRVAPEKKQDVGKFVELPGAEMGKVTVRFPPEASGYLHIGHAKAALLNQHYQVNFKGKLIMRFDDTNPEKEKEDFEKVILEDVAMLHIKPDQFTYTSDHFETIMKYAEKLIQEGKAYVDDTPAEQMKAEREQRIESKHRKNSVEKNLQMWEEMKKGSQFGQSCCLRAKIDMSSNNGCMRDPTLYRCKIQPHPRTGNKYNVYPTYDFACPIVDSIEGVTHALRTTEYHDRDEQFYWIIEALGIRKPYIWEYSRLNLNNTVLSKRKLTWFVNEGLVDGWDDPRFPTVRGVLRRGMTVEGLKQFIAAQGSSRSVVNMEWDKIWAFNKKVIDPVAPRYVALLKKEVIPVNIPEAQEAMKEVARHPKNPDVGLKPVWYSPKVFIEGADAETFSEGEMVTFINWGNINITKIHKNADGKIVSLDAKLNLENKDYKKTTKITWLAETTHALPIPAICVTYEHLITKPVLGKEEDFKQYVNKNSKHEELMLGDPCLKDLKKGDIIQLQRRGFFICDQPYEPVSPYSCREAPCILIYIPDGHTKEMPMFGSKEKTKVEATKNETTTPLKEKPAASLNNTCGTFESVVLYNRVAVQGDMVRELKAKKAAKEDIDAAVKQLLALKAEYKEKTGQEYKPGHPPAVVQDISSKSSASILESQSLYDEVAAQGEVVRKLKADKAPKAKINEAVECLLSLKTQYKEKTGKEYIPGQPPLSRSSDSSPTRNSESTGSETPEAKVLFDKVASQGEVVRKLKAEKASKDQIDVAVQELLQLKAQYTSLTGVEYKPVSVTGAEDKDKKKKEKENKSEKQNKPQKQNDGQRKDPSKNQGSGLSPSGAGEGQGPKKQTRLGLEAKKEENLADWYSQVITKSEMIEYYDVSGCYILRPWAYSIWEFIKDFFDAEIKKLGVENCYFPMFVSQSALEKEKTHIADFAPEVAWVTRSGKTELAEPIAVRPTSETVMYPAYAKWVQSHRDLPIRLNQWCNVVRWEFKHPQPFLRTREFLWQEGHSAFATFEEAAEEVLQILDLYAQVYEELLAIPVVKGRKTEKEKFAGGHYTTTVEAFISASGRAVQGATSHHLGQNFSRMFEIIFEDPKTPGEKQFAYQNSWGLTTRTIGVMTMVHGDNMGLVLPPRVACVQVVVIPCGITNALPEEDREALITKCNDYRRRLLSVNIRVRVDLRDNYSPGWKFNHWELKGVPVRLEVGPRDMKSCQFVAVRRDTGEKLTVAENEAETKLQAILEDIHVNLFTRASEDLKTHMVIADTMEDFQKALDSGKIAQIPFCGEVDCEDWIKKATARDQDLEPGAPSMGAKSLCIPFKPLCELQPGARCVCGKNVAKYYTLFGRSY

SEQ ID NO: 67 - protein, 1512 aa, Artificial Sequence
  EPRS XP_006188215.1
MGTLCLTVNSGDPPLGALLAVEHVKDSVSISVEEGKENILRVSENVVFTDINSILRYLARIATTAGLYGSNLLEHTEIDHWLEFSATKLSSCNLFTSAINELNHCLSLRTYLVGNSLSLADLCVWATLKGNTAWQDQLEQNKAPVHVKRWFGFLEAQQAFQSVGTKWNVSTTKAKAAPEKKQDIGRFVELPGAEMGKVIVRFPPEASGYLHIGHAKAALLNQHYQVNFKGKLIMRFDDTNPEKEKEDFEKVILEDVAMLHIKPDQFTYTSDHFETIMKYAEKLIQEGKAYVDDTPAEQMKAEREQRIESKHRENSIEKNLQMWEEMKKGSQLGQSCCLRAKIDMSSNNGCMRDPTLYRCKIQPHPKTGNKYNVYPTYDFACPIVDSIEGVTHALRTTEYHDRDEQFYWIIEALGIRKPYIWEYSRLNLNNTVLSKRKLTWFVNEGLVDGWDDPRFPTVRGVLRRGMTVEGLKQFIAAQGSSRSVVNMEWDKIWAFNKKVIDPVAPRYVALLKKEVIPVNVPEAQEEMKEVAKHPKNPDVGLKPVWYSPKVLIEGADAETLSEGEMVTFINWGNINITKIHKNADGKIVSLDAKLNLENKDYKKTTKITWLAETARALPVPAICVTYEHLITKPVLGKDEDFKQYVNKDSKHEELMLGDPCLKDLKKGDIIQLQRRGFFICDQPYEPVSPYSCVEAPCILIYIPDGHTKEMPTSGSKEKTKVETTKNQTPSPLKTRSPPSLNSTCATSEESLVLYNRVADQGDVVRELKAKKAAKEDIDAAVKQLLALKAEYKEKTGQEYKPGNPPALVVQDVSSKSSSGILDSKSLYDEVAAQGEVVRKLKAEKAPKAKVNEAVECLLSLKAQYKEKTGKEYIPGQPPSPQSSDSSPTRSAEPSGPETPEAKLLFDKVALQGEVVRKLKAEKASKDQVDTAVQELLQLKAQYKSLTGVDYKPVSTIGAEEKDKRKKEKENKCEKQNKPQKQNDSLKKDWSKSQGSGLPSSGAGEGQGPKKQTRLGLEAKKEENLADWYSQVITKSEMIEYYDVSGCYILRPWAYSIWESIKDFFDAEIKKLGIENCYFPMFVSQGALEKEKTHIADFAPEVAWVTRSGKTELAEPIAVRPTSETVMYPAYAKWVQSHRDLPIRLNQWCNVVRWEFKHPQPFLRTREFLWQEGHSAFATFEEAAEEVLQILDLYAQVYEELLAIPVVKGRKTEKEKFAGGDYTTTVEAFISASGRAIQGATSHHLGQNFSKMFEIIFEDPKTPGEKQFAYQNSWGLTTRTIGVMTMVHGDNMGLILPPRVACVQVVVIPCGITNALSEEDRDALIAKCNDYRRRLLSVNIRVKVDLRDNYSPGWKFNHWELKGVPIRLEVGPRDMKSCQFVAVRRDTGEKLTVAENEAETKLRAVLEDIHVTLFTRASEDLKTHMVVANTMEDFQKELDSGKIAQIPFCGEIDCEDWIKKTTARDQDLEPGAPSMGAKSLCIPFKPLCELQPGAKCVCGKNPAKFYTLFGRSY

SEQ ID NO: 68 - protein, 1512 aa, Artificial Sequence
  EPRS XP_006198933.1
MGTLCLTVNSGDPPLGALLAVEHVKDSVSISVEEGKENILRVSENVVFTDINSILRYLARIATTAGLYGSNLMEHTEIDHWLEFSATKLSSCNLFTSAINELNHCLSLRTYLVGNSLSLADLCVWATLKGNTAWQDQLEQNKAPVHVKRWFGFLEAQQAFRSVGTKWNVSTTKAKAAPEKKQDVGKFVELPGAEMGKVIVRFPPEASGYLHIGHAKAALLNQHYQVNFKGKLIMRFDDTNPEKEKEDFEKVILEDVAMLHIKPDQFTYTSDHFETIMKYAEKLIQEGKAYVDDTPAEQMKAEREQRIESKHRENSIEKNLQMWEEMKKGSQLGQSCCLRAKIDMSSNNGCMRDPTLYRCKIQPHPRTGNKYNVYPTYDFACPIVDSIEGVTHALRTTEYHDRDEQFYWIIEALGIRKPYIWEYSRLNLNNTVLSKRKLTWFVNEGLVDGWDDPRFPTVRGVLRRGMTVEGLKQFIAAQGSSRSVVNMEWDKIWAFNKKVIDPVAPRYVALLKKEVIPVNVPEAQEEMKEVAKHPKNPDVGLKPVWYSPKVLIEGADAETLSEGEMVTFINWGNINITKIHKNADGKIVSLDAKLNLENKDYKKTTKITWLAETARALPVPAICVTYEHLITKPVLGKDEDFKQYVNKDSKHEELMLGDPCLKDLKKGDIIQLQRRGFFICDQPYEPVSPYSCVEAPCILIYIPDGHTKEMPTSGSKEKTKVETTKNQTPSPLKTRSPPSLNSTCATSEESLVLYNRVADQGDVVRELKAKKAAKEDIDAAVKQLLALKAEYKEKTGQEYKPGNPPALVVQDVSSKSSSGILDSKSLYDEVAAQGEVVRKLKAEKAPKAKVNEAVECLLSLKAQYKEKTGKEYIPGQPPSPQSSDSSPTRSAEPSGPETPEAKLLFDKVALQGEVVRKLKAEKASKDQVDTAVQELLQLKAQYKSLTGVDYKPVSAIGAEEKDKRKKEKENKCEKQNKPQKQNDSLKKDWSKSQGSGLPSNGAGEGQGPKKQTRLGLEAKKEENLADWYSQVITKSEMIEYYDVSGCYILRPWAYSIWESIKDFFDAEIKKLGVENCYFPMFVSQGALEKEKTHIADFAPEVAWVTRSGKTELAEPIAVRPTSETVMYPAYAKWVQSHRDLPIRLNQWCNVVRWEFKHPQPFLRTREFLWQEGHSAFATFEEAAEEVLQILDLYAQVYEELLAIPVVKGRKTEKEKFAGGDYTTTVETFISASGRAIQGATSHHLGQNFSKMFEIIFEDPKTPGEKQFAYQNSWGLTTRTIGVMTMVHGDNVGLVLPPRVACVQVVVIPCGITNALSEEDRDALTAKCNDYRRRLLSVNIRVKVDLRDNYSPGWKFNHWELKGVPIRLEVGPRDMKSCQFVAVRRDTGEKLTVAENEAETKLRAILEDIHVNLFTRASEDLKTHMVVANTMEDFQKELDSGKIAQIPFCGEIDCEDWIKKTTARDQDLEPGAPSMGAKSLCIPFKPLCELQPGAKCVCGKNPAKFYTLFGRSY

SEQ ID NO: 69 - protein, 1512 aa, Artificial Sequence
  EPRS XP_004480290.1
MATLCLTVNSGDPPLGALLTVEHVKDNVSISVEDGKENILHVSENVVFTDINSILRYLARVATTAGLYGSNLLEHTEIDHWLEFSATKLSSCNVFTSAINDLNHCLSLRTYLVGNTLSLADICVWATLKGNAAWQEHLKQNKAPVHVKRWFGFLEAQQAFQSVGTKWNVPTNKAKVAPEKKQDVGKFVELPGAEMGKVTVRFPPEASGYLHIGHAKAALLNQHYQVNFKGKLIMRFDDTNPEKEKEDFEKVILEDVAMLHIKPDQFTYTSDHFGTIMKYAEKLIQEGKAYVDDTPAEQMKAEREQRIESKQRNNSVEKNLQMWEEMKKGSQFGQSCCLRAKIDMSSNNGCMRDPTLYRCKIHPHPRTGNKYNVYPTYDFACPIVDSIEGVTHALRTTEYHDRDEQFYWIIEALGIRKPHIWEYSRLNLNNTVLSKRKLTWFVNEGLVDGWDDPRFPTVRGVLRRGMTVEGLKQFIAAQGSSRSVVNMEWDKIWAFNKKVIDPVAPRYVALLKKEVVPVNVPEAQEEMKEVAKHPKNPDIGLKLVWYSPKVFIEGADAETLSEGEMVTFINWGNINITKIHKNADGKIVSLDAKLNLENKDYKKTTKITWLAETAHALPVPAICVTYEHLITKPVLGKDEDFKQYVNKNSKHEELMLGDPCLKDLKKGDIIQLQRRGFFICDQPYEPVSPYSCREAPCVLIYIPDGHTKEMPTSGSKEKTKAEPTKNETAAPFNGSSAPSLSNTCAAAEDSLALYSKVAAQGDVVRDLKAKKAAKEDIDAAVKQLLALKAEYKGKTGQEYKPGNPPAVVVQNIPSKSSASILESKSLYDEVAAQGEVVRKLKAEKAPKAKVNEAVECLLSLKARYKEKTGKEYIPGQPPLSQNSDSGPTRSAEPSGPETPEAKVLFDKVASQGEVVRSLKAEKASKDQIDLAVQELLGLKAQYKSLTGVEYKPLSATGAEDKDKKKKEKENKSEKQNKPQKPNDGQKKDSSKSQGGGLAPGGAGEGQGPKKQTRLGLEAKKEENLADWYSQVITKSEMIEYYDVSGCYILRPWAYSIWESIKDFFDAEIKKLGVENCYFPMFVSQGALEKEKTHIADFAPEVAWVTRSGKTELAEPIAVRPTSETVMYPAYAKWVQSHRDLPIRLNQWCNVVRWEFKHPQPFLRTREFLWQEGHSAFATFEEAAEEVLQILDLYAQVYEELLAIPVVKGRKTEKEKFAGGDYTTTVEAFVSANGRAIQGATSHHLGQNFSKMFEIVFEDPKAPGEKQFAYQNSWGLSTRTLGVMTMVHGDNMGLVLPPRVACVQVVVIPCGITNALSEEDKEALIAKCNDYRKRLLSVNIRVRADLRDNYSPGWKFNHWELKGVPIRLEVGPRDMKNCQFIAVRRDTGEKLMVAENEAETKLQALLEDIHVNLFTRASEDLKTRMVVANTMEEFQKALDSGKIVQIPFCGEIDCEDWIKKTTARDQDLEPGAPSMGAKSLCIPFKPLCELQPGARCLCGKNPAKYYTLFGRSY

SEQ ID NO: 70 - protein, 1512 aa, Artificial Sequence
  EPRS XP_008266633.1
MATLCLTVNSGDPPLGALLAVEHLKGDVSISVEEGKENILRVSENVVFVDVNSILRYLARVANRVGLYGSNLLEHTEIDHWLEFSTTKLSSCDLFTSAVNELNHCLSLRTYLVGNSLSLADLCVWATLKGSAAWQEQLKQNKAPVHVKRWFGFLEAQQAFQSVGSKWGVSANKAKVVPEKKQDVGKFVELPGAEMGKVTVRFPPEASGYLHIGHAKAALLNQHYQVNFKGKLIMRFDDTNPEKEKEDFEKVILEDVAMLHIKPDQFTYTSDHFETIMKYAEKLIQEGKAYVDDTPAEQMKAEREQRLESKHRQNSIEKNLQMWEEMKKGSQFGQSCCLRAKIDMTSNNGCMRDPTLYRCKIQPHPRTGSKYNVYPTYDFACPIVDSIEGVTHALRTTEYHDRDEQFYWIIEALGIRKPYIWEYSRLNLNNTVLSKRKLTWFVNEGLVDGWDDPRFPTVRGVLRRGMTVEGLKQFIAAQGSSRSVVNMEWDKIWAFNKKVIDPVAPRYVALLKKEVVSVNVPEAQEEMKEVSKHPKNPDVGLKPVWYSPKIFIEGADAETLSEGEMVTFINWGNINITKIHKNADGKIVSLDAKLNLENKDYKKTTKITWLAETAHALPVPAICVTYEHLITKPVLGKDEDFKQYVNKNSKREELMLGDPCLKDLKKGDIIQLQRRGFFICDQPYEPVSPHSCKEAPCVLIYIPDGHTKEMPTSGSKEKTKVETIKNETTAPFKDRPAPSLSNTCATSEDPVLLYNKVAAQGDVVRELKSKKAAKEDIDIAVKQLLALKAEYKEKTGQEYKPGNPPTAVIQNISSKSSTSVLESKSLYDEVAAQGEVVRKLKAEKAPKAKINEAVECLLSLKAEYKAKTGKEYVPGQPPLSQSSDSSPAGNSDPRGPETPEAKALFDKVACQGEVVRKLKAEKTSKDQIDAAVQELLQLKAQYKSLTGVEYKPVSATGAEEKDKKKKEKENKSEKQNKPQKQNDSQRKDTSKSQGGGLSASGAGEGQGPKKQTRLGLEAKKEENLADWYSQVITKSEMIEYYDVSGCYILRPWAYSIWESIKDFFDAEIKKLGVENCYFPIFVSQSALEKEKTHVADFAPEVAWVTRSGKTELAEPIAIRPTSETVMYPAYAKWVQSHRDLPIRLNQWCNVVRWEFKHPQPFLRTREFLWQEGHSAFATFEEAAEEVLQILDLYARVYEELLAIPVVKGRKTEKEKFAGGDYTTTIEAFISASGRAIQGGTSHHLGQNFSKMCEIVFEDPKTPGEKQFAYQCSWGLTTRTIGVMIMVHGDNMGLVLPPRVASVQVVVIPCGITNALSEEDKEALIAKCNDYCRRLLSVSIRVRADLRDNYSPGWKFNHWELKGVPIRLEVGPRDMKNCQFVAVRRDTGEKLTIAENEAETKLQTILEDIQANLFTRASEDLKTHMVVADTMEDFQKILDSGKIAQIPFCGEIDCEDWIKKTTARDQDLEPGAPSMGAKSLCIPFKPLRELQPGAKCICGKNPAKFYTLFGRSY

SEQ ID NO: 71 - protein, 1511 aa, Artificial Sequence
  EPRS XP_006056008.1
MATLCLTVNSGDPPLGALLAVEHVKDNVSISVEEGKENILHVSENVVFTDINSILRYLARIATTAGLYGSNLLEHTEIDHWLEFSATKLSSCDLFTAAVNELNHCLSLRTYLVGNSLSLADLCVWATLKGNAAWQEQLGQNKAPVHVKRWFGFLEAQQTFQSVGTKWNVSATKAKVVPEKKQDVGKFVELPGAEMGKVTVRFPPEASGYLHIGHAKAALLNQHYQVSFKGKLIMRFDDTNPEKEKEDFEKVILEDVAMLHIKPDQFTYTSDHFETIMKYAEKLIQEGKAYVDDTPAEQMKAEREQRIESKHRENSVEKNLQMWEEMKKGSQFGQSCCLRAKIDMSSNNGCMRDPTLYRCKIQPHPRTGNKYNVYPTYDFACPIVDSIEGVTHALRTTEYHDRDEQFYWIIEALGIRKPFIWEYSRLNLNNTVLSKRKLTWFVNEGLVDGWDDPRFPTVRGVLRRGMTVEGLKQFIAAQGSSRSVVNMEWDKIWAFNKKVIDPVAPRYVALLKKEVVPVNIPEAQEEMKEVAKHPKNPDVGLKPVWYSSKVFIEGADAETLSEGEMVTFINWGNINITKIHKSAEGKIVSLDAKLNLENKDYKKTTKITWLAETEHALPVPAICVTYEHLITKPVLGKDEDFKQYVNKNSKHEELMLGDPCLKDLKKGDIIQLQRRGFFICDQPYEPVSPYSCIEAPCILIYIPDGHTKEMPTSGSKEKTKVETAKNEASTPLKTRSAPSLSTCATSEDSLVLYNRVAAQGDVVRELKAKKATKEDIDAAVKQLLALKAEYKEKTGQEYKPGNPPAAVGQNISSKSSSNIVESKSLYDEVAAQGELVRKLKAEKAPKAKVNEAVECLLSLKAQYKEKTGKEYVPGQPPSSQSSDSSPPRSSEPSGPETPEAKLLFDKVASQGEVVRKLKAEKASKDQVDTAVQELLQLKAQYKSLTGVDYKPVSATGAEEKDKKKKEKENKSEKQNKPQKQNDSQKKDSSKNQESGLSPNGTGEGQGPKKQTRLGLEARKEDSLADWYSQVITKSEMIEYYDVSGCYILRPWAYSIWESIKDFFDAEIKKLGVENCYFPMFVSQGALEKEKTHIADFAPEVAWVTKSGKTELAEPIAIRPTSETVMYPAYAKWVQSHRDLPVKLNQWCNVVRWEFKHPQPFLRTREFLWQEGHSAFATFEEAAEEVLQILDLYARVYEELLAIPVVKGRKTEKEKFAGGDYTTTVEAFISASGRAIQGATSHHLGQNFSKMFEIIFEDPKTAGEKQFAYQNSWGLTTRTIGVMTMVHGDNVGLVLPPRVACVQVVVIPCGITNALSEEDRDALLAKCNDYRRRLLSVSIRVRVDLRDNYSPGWKFNHWELKGVPIRLEVGPRDMKNCQFVAVRRDTGEKLTIAENEAETKLHAILEDIHINLFTRASEDLKTHMVVANTMEDFQKELDSGKIAQIPFCGEIDCEDWIKKTTARDQDLEPGAPSMGAKSLCIPFKPLCELPPGAKCVCGKNPAKYYTLFGRSY

SEQ ID NO: 72 - protein, 1511 aa, Artificial Sequence
  EPRS XP_007935118.1
METLCLTVNAGDPPLGALVAVEHVKDSVSISVEEGKENILRVSENVVFTDISSILRYLARVATTAGLYGSNLMEHTEIDHWLEFSATKLSSCNLFTSAISELNHCLSLRTYLVGNSLSLADLCVWATLKGHATWQEQLKQNKALVHVKRWFGFLEAQQAFQSVGSKWYVSTTKPKVASEKKQDVGKFIELPGAEMGKVTVRFPPEASGYLHIGHAKAALLNQHYQVNFKGKLIMRFDDTNPEKEKEDFEKVILEDVAMLHIKPDQFTYTSDHFETIMKYAEKLIQEGKAYVDDTPAEQMKVEREQRIESKHRNNSIEKNLQMWEEMKKGTQFGQSCCLRAKIDMTSNNGCMRDPTLYRCKIQPHPRTGNKYNVYPTYDFACPIVDSTEGVTHALRTTEYHDRDEQFYWIIEALGIRKPYIWEYSRLNLNNTVLSKRKLTWFVNEGLVDGWDDPRFPTVRGVLRRGMTVEGLKQFIAAQGSSRSVVNMEWDKIWAFNKKVIDPVAPRYVALLKKEVIPVNIPEAQEKMKEVARHPKNPDVGLKPVWYSPKVFIEGADAETLSEGEMVTFINWGNINITKIHRNTDGKILSLDAKLNLENKDFKKTTKITWLAETAHALPVPAICVTYEHLITKPVLGKDEDFKQYVNKNSKHEELMLGDPCLKDLKKGDIIQLQRRGFFICDQPYEPVSPYSCREAPCVLIYIPDGHTKEMPTSGSKEKTKVEMAKNETIPCKEKPAPAMDNTCATSEDSLVLYNRVAVQGEVVRELKAKKAAKEDIDIAVKQLLALKAEYKEKTGQEYQPGNPPAAVVQNISSESSEGILDSKSLYDEVAAQGEVVRKLKAEKAPKEKVNEAVECLLSLKAQYKEKTGKEYVPRQPLLSQNSDSSPTRSSEHSGPETPEAKGLFDKVASQGEVVRTLKAEKASKDQIETAVQELLQLKAQYKSLTGVEYKPVSVTGAEDKDKKKKEKENKSEKQNKSQKQNDGQRKDSSKNQGSGQSSGGPGEGQGPKKQTRLGLEAKKEENLADWYSQVITKSEMIEYYDVSGCYILRPWAYSIWESIKDFFDAEIKKLGVENCYFPMFVSQGALEKEKTHIADFAPEVAWVTRSGKTELAEPIAVRPTSETVMYPAYAKWVQSHRDLPIRLNQWCNVVRWEFKHPQPFLRTREFLWQEGHSAFATFEEAAEEVLQILDLYAQVYEELLAIPVVKGRKTEKEKFAGGDYTTTIEAFISASGRAIQGATSHHLGQNFSKMFEIIFEDPKTPGEKQFAYQNSWGLTTRTIGVMTMVHGDNMGLVLPPRVACVQVVIIPCGITNALSEEDKEALIEKCNDYRKRLLNVNIRVRVDLRENYSPGWKFNHWELKGVPVRLEVGPRDMKSCQFVAVRRDTGEKLTVTENEAESKLQAILEDIHVNLYTRASQDLKTHMVVANTMDDFQKVLDSGKIAQIPFCGEIDCEDWIKKTTARDQDLEPGAPSMGAKSLCTPFKPLCELQPGAKCVCGKNPAKYYTLFGRSY

SEQ ID NO: 73 - protein, 1519 aa, Artificial Sequence
  EPRS XP_007455449.1
  misc_feature (36)..(41): Xaa is any amino acid
MATLCLTVNSGDPPLGALLAVEHVKDNVSISVEEGXXXXXXGKENILHVSENVVFTDINSILRYLARIATTAGLYGSNLLEHTEIDHWLEFSATKLSSCDLFTSAINELSHCLSLRTYLVGNSLSLADLCVWATLKGNAAWQEQLEQNKAPVHVKRWFGFLEAQQAFQSVGTKWNVSTTKAKVVPEKKQDVGKFVELPGAEMGKVTVRFPPEASGYLHIGHAKAALLNQHYQVNFKGKLIMRFDDTNPEKEKEDFEKVILEDVAMLHIKPDQFTYTSDHFETIMKYAEKLIQEGKAYVDDTPAEQMKAEREQRIESKHRKNSVEKNLQMWEEMKKGSQFGQSCCLRAKIDMSSNNGCMRDPTLYRCKIQPHPRTGNKYNVYPTYDFACPIVDSIEGVTHALRTTEYHDRDEQFYWIIEALGLRKPYIWEYSRLNLNNTVLSKRKLTWFVNEGLVDGWDDPRFPTVRGVLRRGMTVEGLKQFIAAQGSSRSVVNMEWDKIWAFNKKVIDPVAPRYVALLKKEVIPVDIPEAQEEMKEVARHPKNPDVGLKPVWYSPKVFIEGADAETLSEGETVTFINWGNINITKIHRNAEGKIVSLDAKLNLENKDYKKTTKITWLAETERALPVPAICVTYEHLITKPVLGKDEDFKQYVNKNSKHEELMLGDPCLKDLKKGDIIQLQRRGFFICDQPYEPISPYSCIEAPCILIYIPDGHTKEMPTSGSKEKTKVETTKNEAATPLKTVSAPSLNNTCATSEDSLVLYNRVAVQGNVVRELKAKKAAKEDIDAAVKQLLALKAEYKEKTGQEYKLGNPPAAIVQNVSSTSSSDILERKSLYDEVAAQGEVVRKLKAEKAPKAKVNEAVECLLSLKAQYKEKTGKEYVPGQPPSSQSSDSSPSRSSELHGPETPEAKSLFDRVATQGDVVRKLKAEKASKDQVDTAVQELLQLKAQYKSLTGVDYKPVSANGAEEKDKKKKEKENKSEKQNKTQKQNDGQKKDSCKNQGSGLSSSGPGEGQGPKKQTRLGLEAKKEENLADWYSQVITKSEMIEYYDVSGCYILRPWAYSIWESIKDFFDAEIKKLGVENCYFPMFVSQGALEKEKTHVADFAPEVAWVTRSGKTELAEPIAVRPTSETVMYPAYAKWVQSHRDLPIRLNQWCNVVRWEFKHPQPFLRTREFLWQEGHSAFATFEEAAEEVLQILDLYAKVYEELLAIPVVKGRKTEKEKFAGGDYTTTVEAFISASGRAIQGATSHHLGQNFSKMFEIIFEDPKTPGEKQFAYQNSWGLTTRTIGVMTMVHGDNMGLVLPPRVACVQVVVIPCGITNALSEEDRDALIAKCNDYRRRLLSVNIRVRADLRDNYSPGWKFNHWELKGVPIRLEVGPRDMKSCQFVAVRRDTGEKLTVAENEAETKLHAILEDIHVNLFTRASEDLKTHMVVANTMEDFQKELDSGKIAQIPFCGEIDCEDWIKKTTARDQDLEPGAPSMGAKSLCIPFRPLCELQPGAQCICGKNPAKYYTLFGRSY

SEQ ID NO: 74 - protein, 1511 aa, Artificial Sequence
  EPRS NP_001230249.1
MATLCLTVNSGDPPLGALLAVEHVKDNVSISVEEGKENILHVSENVVFTDINSILRYLARIATAAGLYGSNLLEHTEIDHWLEFSATKLSSCDLFTSAVNELNHCLSLRTYLVGNSLSLADLCVWATLKGNAAWQEQLGQNKAPVHVKRWFGFLEAQQAFQSVGTKWNVSATKAKVVPEKKQDVGKFVELPGAEMGKVTVRFPPEASGYLHIGHAKAALLNQHYQVNFKGKLIMRFDDTNPEKEKEDFEKVILEDVAMLHIKPDQFTYTSDHFETIMKYAEKLIQEGKAYVDDTPAEQMKAEREQRIESKHRENSVEKNLQMWEEMKKGSQFGQSCCLRAKIDMSSNKGCMRDPTLYRCKIKAHPRTGNKYNVYPTYDFACPIVDSIEGVTHALRTTEYHDRDEQFYWIIEALGIRKPFIWEYSRLNLNNTVLSKRKLTWFVNEGLVDGWDDPRFPTVRGVLRRGMTVEGLKQFIAAQGSSRSVVNMEWDKIWAFNKKVIDPVAPRYVALLKKEVVPVNIPEAQEEMKEVAKHPKNPDVGLKPVWYSSKVFIEGADAETLSEGEMVTFINWGNINITKIHKSAEGKIVSLDAKLNLENKDYKKTTKITWLAETEHALPVPAICVTYEHLITKPVLGKDEDFKQYVNKNSKHEELMLGDPCLKDLKKGDIIQLQRRGFFICDQPYEPVSPYSCIEAPCILIYIPDGHTKEMPTSGSKEKTKVETTKNEASTPLKTRSAPSLSTCATSEDSLVLYNRVAAQGDVVRELKAKKATKEDIDAAVKQLLALKAEYKEKTGQEYKPGNPPAAVGQNISSKSSSNIVESKSLYDEVAAQGEVVRKLKAEKAPKAKVNEAVECLLSLKAQYKEKTGKEYVPGQPPSSQSSDSSPPRSSEPSGPETPEAKLLFDKVASQGEVVRKLKAEKASKDQVDTAVQELLQLKAQYKSLAGVDYKPVSATGAEEKDKKKKEKENKSEKQNKPQKQNDSQKKDSFKTQGSGLSPNGAGEGQGPKKQTRLGLEARKEDSLADWYSQVITKSEMIEYYDVSGCYILRPWAYSIWESIKDFFDAEIKKLGVENCYFPMFVSQGALEKEKTHIADFAPEVAWVTRSGKTELAEPIAIRPTSETVMYPAYAKWVQSHRDLPVKLNQWCNVVRWEFKHPQPFLRTREFLWQEGHSAFATFEEAAEEVLQILDLYARVYEELLAIPVVKGRKTEKEKFAGGDYTTTVEAFISASGRAIQGATSHHLGQNFSKMFEIVFEDPKTAGEKQFAYQNSWGLTTRTIGVMTMVHGDNVGLVLPPRVACVQVVVIPCGITNALSEEDRDALLAKCSDYQRRLLSVNIRVRVDLRDNYSPGWKFNHWELKGVPIRLEVGPRDMKNCQFVAVRRDTGEKLTIAENEAETKLHAILEDIHINLFTRASEDLKTHMVVANTMEDFQKELDSGKIAQIPFCGEIDCEDWIKKTTARDQDLEPGAPSMGAKSLCIPFKPLCELPPGAKCVCGKNPAKYYTLFGRSY

SEQ ID NO: 75 - protein, 1518 aa, Artificial Sequence
  EPRS XP_006056007.1
MATLCLTVNSGDPPLGALLAVEHVKDNVSISVEEGKENILHVSENVVFTDINSILRYLARIATTAGLYGSNLLEHTEIDHWLEFSATKLSSCDLFTAAVNELNHCLSLRTYLVGNSLSLADLCVWATLKGNAAWQEQLGQNKAPVHVKRWFGFLEAQQTFQSVGTKWNVSATKAKVVPEKKQDVGKFVELPGAEMGKVTVRFPPEASGYLHIGHAKAALLNQHYQVSFKGKLIMRFDDTNPEKEKEDFEKVILEDVAMLHIKPDQFTYTSDHFETIMKYAEKLIQEGKAYVDDTPAEQMKAEREQRIESKHRENSVEKNLQMWEEMKKGSQFGQSCCLRAKIDMSSNNGCMRDPTLYRCKIQPHPRTGNKYNVYPTYDFACPIVDSIEGVTHALRTTEYHDRDEQFYWIIEALGIRKPFIWEYSRLNLNNTVLSKRKLTWFVNEGLVDGWDDPRFPTVRGVLRRGMTVEGLKQFIAAQGSSRSVVNMEWDKIWAFNKKLRALCKKVIDPVAPRYVALLKKEVVPVNIPEAQEEMKEVAKHPKNPDVGLKPVWYSSKVFIEGADAETLSEGEMVTFINWGNINITKIHKSAEGKIVSLDAKLNLENKDYKKTTKITWLAETEHALPVPAICVTYEHLITKPVLGKDEDFKQYVNKNSKHEELMLGDPCLKDLKKGDIIQLQRRGFFICDQPYEPVSPYSCIEAPCILIYIPDGHTKEMPTSGSKEKTKVETAKNEASTPLKTRSAPSLSTCATSEDSLVLYNRVAAQGDVVRELKAKKATKEDIDAAVKQLLALKAEYKEKTGQEYKPGNPPAAVGQNISSKSSSNIVESKSLYDEVAAQGELVRKLKAEKAPKAKVNEAVECLLSLKAQYKEKTGKEYVPGQPPSSQSSDSSPPRSSEPSGPETPEAKLLFDKVASQGEVVRKLKAEKASKDQVDTAVQELLQLKAQYKSLTGVDYKPVSATGAEEKDKKKKEKENKSEKQNKPQKQNDSQKKDSSKNQESGLSPNGTGEGQGPKKQTRLGLEARKEDSLADWYSQVITKSEMIEYYDVSGCYILRPWAYSIWESIKDFFDAEIKKLGVENCYFPMFVSQGALEKEKTHIADFAPEVAWVTKSGKTELAEPIAIRPTSETVMYPAYAKWVQSHRDLPVKLNQWCNVVRWEFKHPQPFLRTREFLWQEGHSAFATFEEAAEEVLQILDLYARVYEELLAIPVVKGRKTEKEKFAGGDYTTTVEAFISASGRAIQGATSHHLGQNFSKMFEIIFEDPKTAGEKQFAYQNSWGLTTRTIGVMTMVHGDNVGLVLPPRVACVQVVVIPCGITNALSEEDRDALLAKCNDYRRRLLSVSIRVRVDLRDNYSPGWKFNHWELKGVPIRLEVGPRDMKNCQFVAVRRDTGEKLTIAENEAETKLHAILEDIHINLFTRASEDLKTHMVVANTMEDFQKELDSGKIAQIPFCGEIDCEDWIKKTTARDQDLEPGAPSMGAKSLCIPFKPLCELPPGAKCVCGKNPAKYYTLFGRSY

SEQ ID NO: 76 - protein, 1508 aa, Artificial Sequence
  EPRS XP_005905625.1
MATLCLTVNSGDPPLGALLAVEHVKDNVSISVEEGILHVSENVVFTDINSILRYLARIATAAGLYGSNLLEHTEIDHWLEFSATKLSSCDLFTSAVNELNHCLSLRTYLVGNSLSLADLCVWATLKGNAAWQEQLGQNKAPVHVKRWFGFLEAQQAFQSVGTKWNVSATKAKVVPEKKQDVGKFVELPGAEMGKVTVRFPPEASGYLHIGHAKAALLNQHYQVNFKGKLIMRFDDTNPEKEKEDFEKVILEDVAMLHIKPDQFTYTSDHFETIMKYAEKLIQEGKAYVDDTPAEQMKVEREQRIESKHRENSVEKNLQMWEEMKKGSQFGQSCCLRAKIDMSSNNGCMRDPTLYRCKIQPHPRTGNKYNVYPTYDFACPIVDSIEGVTHALRTTEYHDRDEQFYWIIEALGIRKPFIWEYSRLNLNNTVLSKRKLTWFVNEGLVDGWDDPRFPTVRGVLRRGMTVEGLKQFIAAQGSSRSVVNMEWDKIWAFNKKVIDPVAPRYVALLKKEVVPVNIPEAQEEMKEVAKHPKNPDVGLKPVWYSSKVFIEGADAETLSEGEMVTFINWGNINITKIHKSAEGKIVSLDAKLNLENKDYKKTTKITWLAETEHALPVPAICVTYEHLITKPVLGKDEDFKQYVNKNSKHEELMLGDPCLKDLKKGDIIQLQRRGFFICDQPYEPVSPYSCIEAPCILIYIPDGHTKEMPTSGSKEKTKVETTKNEASTPLKTRSAPSLSTCATSEDSLVLYNRVAAQGDVVRELKAKKATKEDIDAAVKQLLALKAEYKEKTGQEYKPGNPPAAVGQNISSKSSSNIVESKSLYDEVAAQGEVVRKLKAEKAPKAKVNEAVECLLSLKAQYKEKTGKEYVPGQPPSSQSSDSSPPRSSEPSGPETPEAKLLFDKVASQGEVVRKLKAEKASKDQVDTAVQELLQLKAQYKSLTGVEYKPVSATGAEEKDKKKKEKENKSEKQNKPQKQNDSQKKDSFKTQGSGLSPNGAGEGQGPKKQTRLGLEARKEDSLADWYSQVITKSEMIEYYDVSGCYILRPWAYSIWESIKDFFDAEIKKLGVENCYFPMFVSQGALEKEKTHIADFAPEVAWVTRSGKTELAEPIAIRPTSETVMYPAYAKWVQSHRDLPVKLNQWCNVVRWEFKHPQPFLRTREFLWQEGHSAFATFEEAAEEVLQILDLYARVYEELLAIPVVKGRKTEKEKFAGGDYTTTVEAFISASGRAIQGATSHHLGQNFSKMFEIVFEDPKTAGEKQFAYQNSWGLTTRTIGVMTMVHGDNVGLVLPPRVACVQVVVIPCGITNALSEEDRDALLAKCSDYQRRLLSVNIRVRVDLRDNYSPGWKFNHWELKGVPIRLEVGPRDMKNCQFVAVRRDTGEKLTIAENEAETKLHAILEDIHINLFTRASEDLKTHMVVANTMEDFQKELDSGKIAQIPFCGEIDCEDWIKKTTARDQDLEPGAPSMGAKSLCIPFKPLCELPPGAKCVCGKNPAKYYTLFGRSY

SEQ ID NO: 77 - protein, 1512 aa, Artificial Sequence
  EPRS XP_007129327.1
MATLCLTVNSGDPPLGALLAVEHVKDNVSISVEEGKENILHVSENVVFTDINSILRYLARIATTAGLYGSNLLEHTEIDHWLEFSATKLSSCDLFTSAINELNHCLSLRTYLVGNSLSLADLCVWATLKGNAAWQEQLEQNKAPVHVKRWFGFLEAQQSFQSVGAKWNVSTTKAKVVPEKKQDVGKFVELPGAEMGKVTVRFPPEASGYLHIGHAKAALLNQHYQVNFKGKLIMRFDDTNPEKEKEDFEKVILEDVAMLHIKPDQFTYTSDHFETIMKYAEKLIQEGKAYVDDTPAEQMKAEREQRIESKHRKNSVEKNLQMWEEMKKGSQFGQSCCLRAKIDMSSNNGCLRDPTLYRCKIQPHPRTGNKYNVYPTYDFACPIVDSIEGVTHALRTTEYHDRDEQFYWIIEALGIRKPYIWEYSRLNLNNTVLSKRKLTWFVNEGLVDGWDDPRFPTVRGVLRRGMTVEGLKQFIAAQGSSRSVVNMEWDKIWAFNKKVIDPVAPRYVALLQREVTPVNIPEAREEMKEVAKHPKNPDVGLKPVWYSPKVFIEGADAETLSEGETVTFINWGNINITKIHRNAEGKIVSLDAKLNLENKDYKKTTKITWLAETERALPVPAICVTYEHLITKPVLGKDEDFKQYVNKNSKHEELMLGDPCLKDLKKGDIIQLQRRGFFICDQPYEPISPYSCIEAPCILIYIPDGHTKEMPTSGSKEKTKVETAKNEAAAPLKTRSAPSLNNTCATSEDSLVLYNRVAAQGDVVRELKAKKAAKEDIDAAVKQLLALKAEYKEKTGQEYKLGNPPATIVQNVPSTSSSDILESKSLYDEVAAQGEVVRKLKAEKAPKAKVNEAVECLLSLKGQYKEKTGKEYVPGQPPSSQSSDSSPSRSSEPCGPETPEAKSLFDKVATQGEVVRKLKAEKASKDQVDTAVQELLQLKAQYKSLTGVDYKPVFANGVEEKDKKKKEKENKSEKQNKTQKQNDGQKKDFSKNQGSGLSSSGPGEGQGPKKQTRLGLEAKKEENLADWYSQVITKSELIEYYDVSGCYILRPWAYSIWESIKDFFDAEIKKLGVENCYFPMFVSQGALEKEKTHVADFAPEVAWVTRSGKTVLAEPIAVRPTSETVMYPAYAKWVQSHRDLPIRLNQWCNVVRWEFKHPQPFLRTREFLWQEGHSAFATFEEAAEEVLQILDLYAQVYEELLAIPVVKGRKTEKEKFAGGDYTTTVEAFISASGRAIQGATSHHLGQNFSKMFEIIFEDPKTPGEKQFAYQNSWGLTTRTIGVMTMVHGDNMGLVLPPRVACVQVVVIPCGITNALSEEDRDALIAKCNDYRRRLLGVNIRVRADLRDNYSPGWKFNHWELKGVPIRLEVGPRDMKSCQFVAVRRDTGEKLTVAENEAETKLHALLEDIHVNLFTRASEDLKTHMVVANTMEDLQKELDSGKIAQIPFCGETDCEDWIKKTTARDQDLEPGAPSMGAKSLCIPFRPLCELQPGAQCVCGKNPAKYYTLFGRSY

SEQ ID NO: 78 - protein, 1511 aa, Artificial Sequence
  EPRS XP_007172136.1
  misc_feature (30)..(34): Xaa is any amino acid
MATLCLTVNSGDPPLGALLAVEHVKGKASXXXXXKENILRVSENVVFTDINSILRYLARIATTAGLYGSNLLEHTEIDHWLEFSATKLSSCDLFTSAINELNHCLSLRTYLAGNSLSLADLCVWATLKGNAAWQEQLEQSKAPVHVKRWFGFLEAQQAFQSVGTKWNVSTTKAKVVPEKKQDIGKFVELPGAEMGKVTVRFPPEASGYLHIGHAKAALLNQHYQVNFKGKLIMRFDDTNPEKEKEDFEKVILEDVAMLHIKPDQFTYTSDHFATIMKYAEKLIQEGKAYVDDTPAEQMKAEREQRIESKHRKNSVEKNLQMWEEMKKGSQFGQSCCLRAKIDMSSNNGCMRDPTLYRCKIQPHPRTGNKYSVYPTYDFACPIVDSIEGVTHALRTTEYHDRDEQFYWIIEALGIRKPYIWEYSRLNLNNTVLSKRKLTWFVNEGLVDGWDDPRFPTVRGVLRRGMTVEGLKQFIAAQGSSRSVVNMEWDKIWAFNKKVIDPVAPRYVALLKEEVVPVNIPEAPEEAKEVARHPKNPDVGLKPVWYSPKVFIEGADAETLSEGETVTFINWGNINITKIHKNAEGKIVSLDAKLNLENKDYKKTTKITWLAETERALPVPAICVTYEHLITKPVLGKDEDFKQYVNKNSKHEELMLGDPCLKDLKKGDIIQLQRRGFFICDQPYEPVSPYSCIEAPCILIYIPDGHTKEMPTSGSKEKTKVETTKNEAATPLKTRSAPSLNNTCATSEDSLVLYNRVAVQGDVVRELKAKKAAKEDIDAAVKQLLSLKAEYKEKTGQEYKLGNPPAAIIQNVSSKSSSDILESKSLYDEVAAQGEVVRTLKAEKAPKAKVNEAVECLLSLKAQYKEKTGNEYIPGQPTSSQSSDSSPSRSSEPRGPETPEAKSLFDKVATQGEVVRKLKAEKASKDQVDTAVHELLQLKAQYKSLTGVDYKPVSANGAEEKDKKKKEKENKSEKQNKTQKQNDGQKKDSSKNQGSGLSSGGPGEGQGPKKQTRLGLEAKKEENLADWYSQVITKSEMIEYYDISGCYILRPWAYSIWESIKDFFDAEIKKLGVGNCYFPMFVSQGALEKEKTHIADFAPEVAWVTRSGKTELAEPIAVRPTSETVMYPAYAKWVQSHRDLPIRLNQWCNVVRWEFKHPQPFLRTREFLWQEGHSAFATFEEAAEEVLQILDLYAQVYEELLAIPVVKGRKTEKEKFAGGDYTTTVEAFISASGRAIQGATSHHLGQNFSKMFEIIFEDPKTPGEKQFAYQNSWGLTTRTIGVMTMVHGDNMGLVLPPRVACVQVVVIPCGITNALSEEDRDALIAKCNDYRRRLLSVNIRVRADLRDNYSPGWKFNHWELKGVPIRLEVGPRDMKSCQFVAVRRDTGEKLTVAENEAETKLHAILEDIHVNLFTRASEDLKTHMVVANTMEDFQKELDSGKIAQIPFCGEMDCEDWIKKTTARDQDLEPGAPSMGAKSLCIPFRPLCELQPGAQCVCGKNPAKFYTLFGRSY

SEQ ID NO: 79 - protein, 1512 aa, Artificial Sequence
  EPRS XP_005335922.1
MATLCLTVNSGDPPLEALLVVEHVKGDVSISVEEGKENILRVSENVVFTDINSILRYLARVATTAGLYGTNLMEHTEVDHWLEFSTTKLSSCDLFASAISELNHCLSLRTYLVGNSMTLADLCVWATLKGNAAWQEQFKQNKTPVHVKRWFGFLEAQQAFRSVGAKWDVSTNKARVAPEKKQDVGKFIELPGAEMGKVTVRFPPEASGYLHIGHAKAALLNQHYQVNFKGKLIMRFDDTNPEKEKEDFEKVILEDVALLHIKPDQFTYTSDHFETIMKYAEKLIQEGKAYVDDTPAEQMKAEREQRIESKHRKNSIEKNLQMWEEMKKGSQFGQSCCLRAKIDMSSNNGCMRDPTLYRCKIQPHPRTGNKYNVYPTYDFACPIVDSIEGVTHALRTTEYHDRDEQFYWIIEALGIRKPYIWEYSRLNLNNTVLSKRKLTWFVNEGLVDGWDDPRFPTVRGVLRRGMTVEGLKQFIAAQGSSRSVVNMEWDKIWAFNKKVIDPVAPRYVALLKKEVIPVNVLEAQEEMKEVAKHPKNPDVGLKPVWYSPKVFIEGADAETFSEGEMVTFINWGNIIITKIYKNADGKIVSLDAKLNLENKDYKKTTKITWLAETTHALPVPAICVTYEHLITKPVLGKDEDFKQYVNKNSKHEELMLGDPCLKDLKKGDIIQLQRRGFFICDQPYEPVSPYSCKEAPCILIYIPDGHTKEMPTFGSKEKAKVETTKNEKTAPLKERPAPSLNNTCVTSEDSLVLYNRVAIQGDVVRELKAKKAAKDDIDAAVKQLLALKAEFKEKTGQEYKPGNPPTTVVQSVSSTSPANTSESKSLYDKVAAQGEVVRKLKAEKAPKTKVNEAVECLLSLKAEYKEKTGKDYIPGQPPSSQSSDSNPIRNSDTAGPETPEAKVLFDKVASQGEVVRKLKAEKVSKDQIDTAVQELLQLKAQYKSLTGVEYKPVSATGAEDKDKKKKEKENKSEKQNKPSKQNDGQGKDSNKTQGSGLSSGGAGEGQGPKKQTRLGLEAKKEENLAEWYSQVITKSEMIEYYDVSGCYILRPWSYSIWESIKDFFDAEIKKLGVENCYFPIFVSQGALEKERTHVADFAPEVAWVTRSGKTELAEPIAIRPTSETVMYPAYAKWVQSHRDLPIRLNQWCNVVRWEFKHPQPFLRTREFLWQEGHSAFATFEEAAEEVLKILELYARVYEELLAIPVVKGRKTEKEKFAGGDYTTTIEAFISASGRAIQGATSHHLGQNFSKMCEIIFEDPKTPGEKQFAYQCSWGLTTRTIGVMIMVHGDNMGLILPPRVACVQVVVIPCGITNALSEEDKEALIAKCNDYQKRLHSVNIRVKVDLRDNYSPGWKFNHWELKGVPIRLEVGPRDMKSCQFVAVRRDTGEKLTIAENEAETKIHAILEDIQVNLFTRACEELKTHMVVANTLEDLQKVLDSGKIAQIPFCGEIDCEDWIKKTTARDQDLEPGAPSMGAKSLCIPFKPLCELQPGAKCICGKNPAKFYTLFGRSY

SEQ ID NO: 80 - protein, 1518 aa, Artificial Sequence
  EPRS XP_007172135.1
  misc_feature (30)..(34): Xaa is any amino acid
MATLCLTVNSGDPPLGALLAVEHVKGKASXXXXXKENILRVSENVVFTDINSILRYLARIATTAGLYGSNLLEHTEIDHWLEFSATKLSSCDLFTSAINELNHCLSLRTYLAGNSLSLADLCVWATLKGNAAWQEQLEQSKAPVHVKRWFGFLEAQQAFQSVGTKWNVSTTKAKVVPEKKQDIGKFVELPGAEMGKVTVRFPPEASGYLHIGHAKAALLNQHYQVNFKGKLIMRFDDTNPEKEKEDFEKVILEDVAMLHIKPDQFTYTSDHFATIMKYAEKLIQEGKAYVDDTPAEQMKAEREQRIESKHRKNSVEKNLQMWEEMKKGSQFGQSCCLRAKIDMSSNNGCMRDPTLYRCKIQPHPRTGNKYSVYPTYDFACPIVDSIEGVTHALRTTEYHDRDEQFYWIIEALGIRKPYIWEYSRLNLNNTVLSKRKLTWFVNEGLVDGWDDPRFPTVRGVLRRGMTVEGLKQFIAAQGSSRSVVNMEWDKIWAFNKKLRALCKKVIDPVAPRYVALLKEEVVPVNIPEAPEEAKEVARHPKNPDVGLKPVWYSPKVFIEGADAETLSEGETVTFINWGNINITKIHKNAEGKIVSLDAKLNLENKDYKKTTKITWLAETERALPVPAICVTYEHLITKPVLGKDEDFKQYVNKNSKHEELMLGDPCLKDLKKGDIIQLQRRGFFICDQPYEPVSPYSCIEAPCILIYIPDGHTKEMPTSGSKEKTKVETTKNEAATPLKTRSAPSLNNTCATSEDSLVLYNRVAVQGDVVRELKAKKAAKEDIDAAVKQLLSLKAEYKEKTGQEYKLGNPPAAIIQNVSSKSSSDILESKSLYDEVAAQGEVVRTLKAEKAPKAKVNEAVECLLSLKAQYKEKTGNEYIPGQPTSSQSSDSSPSRSSEPRGPETPEAKSLFDKVATQGEVVRKLKAEKASKDQVDTAVHELLQLKAQYKSLTGVDYKPVSANGAEEKDKKKKEKENKSEKQNKTQKQNDGQKKDSSKNQGSGLSSGGPGEGQGPKKQTRLGLEAKKEENLADWYSQVITKSEMIEYYDISGCYILRPWAYSIWESIKDFFDAEIKKLGVGNCYFPMFVSQGALEKEKTHIADFAPEVAWVTRSGKTELAEPIAVRPTSETVMYPAYAKWVQSHRDLPIRLNQWCNVVRWEFKHPQPFLRTREFLWQEGHSAFATFEEAAEEVLQILDLYAQVYEELLAIPVVKGRKTEKEKFAGGDYTTTVEAFISASGRAIQGATSHHLGQNFSKMFEIIFEDPKTPGEKQFAYQNSWGLTTRTIGVMTMVHGDNMGLVLPPRVACVQVVVIPCGITNALSEEDRDALIAKCNDYRRRLLSVNIRVRADLRDNYSPGWKFNHWELKGVPIRLEVGPRDMKSCQFVAVRRDTGEKLTVAENEAETKLHAILEDIHVNLFTRASEDLKTHMVVANTMEDFQKELDSGKIAQIPFCGEMDCEDWIKKTTARDQDLEPGAPSMGAKSLCIPFRPLCELQPGAQCVCGKNPAKFYTLFGRSY

SEQ ID NO: 81 - protein, 1510 aa, Artificial Sequence
  EPRS XP_003419927.1
MAALCLTVNTGDPLLGALLAVEHIKDNVSISIEEGRENILRVSENVAFTDSNSILRYLARVATTAGLYGSNLMEHTEIDHWLEFSATKLSSCDLFTSAINELNHCLSLRTYLVGNSLSLADLCIWATLKGNAAWQEQFKQSKAPVHAKRWFGFLEAQQAFRSVGSKWDISTTKPKVAPEKKQDVGKFIELPGAEMGKVTVRFPPEASGYLHIGHAKAALLNQHYQVNFKGKLIMRFDDTNPEKEKEDFEKVILEDVAMLHIRPDQFTYTSNHFETIMKYAEKLIQEGKAYVDDTPAEQMKAEREQRIESKHRKNSIEKNLQMWEEMKKGSQFGQSCCLRAKIDMSSNNGCMRDPTLYRCKIQPHPRTGNKYNVYPTYDFACPIVDSIEGVTHALRTTEYHDRDEQFYWIIEALGIRKPYIWEYSRLNLNNTVLSKRKLTWFVNEGLVDGWDDPRFPTVRGVLRRGMTVEGLKQFIAAQGSSRSVVNMEWDKIWAFNKKVIDPVAPRYVALLKKEVIPVNIPEAQEEMKEVAKHPKNPDVGLKPVWYGPKVFIEGADAETLSEGETVTFINWGNINITRIHKNTDGKIVSLDAKLNLENKDFKKTTKITWLAETMHALPVPAICVAYEHLITKPVLGKDEDFKQYVNKNSKREELMLGDPCLKDLQKGDIIQLQRRGFFICDQPYEPVSPYSCREAPCVLIYIPDGHTKEMPTSGSKEKARVETKTESTACKEKPAPSLNSPCATPEDSVVLYSRVADQGDVVRELKAKKAAKEDIDAAVKQLLALKAEYKEKTGQEYKPGNPPAAAAENVSSKSPGSVLDGKSLYDEVAAQGEVVRKLKAEKAPKAKVNEAVECLLSLKAQYKEKTGKEYIPGQPSSSQNSDPGPTRSSEPSGPETPEAKVLFDKVASQGEAVRKLKAEKASKDQVDAAVQELLQLKAQYKSLTGEEYKPISAIGAKDKDKKKKEKENKSEKQNKLQTQSDGQRKDCLKNQGSEQSSGGPGEGQGLKKQTRLGLEAKKEENLADWYSQVITKSEMIEYYDVSGCYILRPWAYAIWEVIKDFFDAEIKKLGVENCYFPIFVSQGALEKEKTHIADFAPEVAWVTRSGKTELAEPIAVRPTSETVMYPAYAKWVQSHRDLPIKLNQWCNVVRWEFKHPQPFLRTREFLWQEGHSAFATFEEAAEEVLQILDLYARVYEELLAVPIVKGRKTEKEKFAGGDYTTTVEAFVSATGRAIQGGTSHHLGQNFSKMFEIVFEDPKTPGEKQFAYQNSWGLTTRTIGVMTLVHGDNMGLVLPPRVACIQVVVIPCGITNALSEEDKEALIAKCNDYQKRLLSVNIRVKVDLRDNYSPGWKFNHWELKGVPVRLEVGPRDMKSCQFVAVRRDTGEKLTVTENEAETKLQALLEDIHVNLFTRAFEDLKTHMVVADTMEDFQKVLDSGKIAQIPFCGEIDCEDWIKKTTARDQDIEPGAPSMGAKSLCIPFKPLRELQPGAKCICGKAPAKYYTLFGRSY

SEQ ID NO: 82 - protein, 1510 aa, Artificial Sequence
  EPRS XP_006869760.1
MATLCLTVNTGDPPLGALLAVEHVKDNVSISIEEGKENILRVSDNVLFTDINSILRYLARVATTAGLYGSNLMEHTEIDHWVELSAAKLSSCNSFMPAVNELNHCLSLRTYLVGNSLTLADLCVWATLKGNATWQEQLKQNKAPVHVKRWFGFLEAQRAFQSVGSKWNVSTTRPKVIPEKKQDVGKFVELPGAEMGKVTVRFPPEASGYLHIGHAKAALLNQHYQVNFKGKLIMRFDDTNPEKEKEDFEKVILEDVAMLHIKPDQFTYTSDHFEIIMKYAEKLIQEGKAYVDDTPAEQMKVEREQRIESKHRNNSIEKNLQMWEEMKKGSQFGQSCCLRAKIDMSSNNGCMRDPALYRCKIQPHPRTGSKYNIYPTYDFACPIVDSIEGVTHALRTTEYHDRDEQFYWIIEALGIRKPYIWEYSRLNLNNTVLSKRKLTWFVNEGLVDGWDDPRFPTVRGVLRRGMTVEGLKQFIAAQGSSRSVVNMEWDKIWAFNKKVIDPVAPRYVALLRKEVIPVNIPEAQEEMKEVAKHPKNPDVGLKPVWYSPKVFIEGADAETLSEGEMVTFINWGNINITKIHKNTDGKIVSLDAKLNLENKDFKKTTKITWLAETAHALPIPAVCVTYEHLITKPVLGKDEDFKQYVNKNSKHEELMLGDPCLKDLKKGDIIQLQRRGFFICDQPYEPVSPYSCRDAPCVLIYIPDGHTKEMPTSGSKEKTKVETAKNETTPNKEKSAPSLNNTCATPEDSLVLYNRVAVQGDVVRELKAKKASKEDIDAAVKQLLALKAEYKEKTGQEYKPGNPPAAVVQNISSKSSESILDSKSLYDEVAAQGEVVRKLKAEKAPKAKVNEAVECLLSLKAQYKEKTGKDYVPGQPPLSQNSGPATRNSEPTGPQTPEAKILFDKVAFQGDVVRKLKAEKASKDQVDTAVQDLLQLKAQYKSLTGVEYKPVSATGPEETDKKKKEKENKSEKQNKPQKQSDGQRKDSSKSQGSGQSSGGPGEGQGPKKQTRLGLEAKKEENLADWYSQVITKSEMIEYYDVSGCYILRPWAYSIWEFIKDFFDAEIKKLGVENCYFPMFVSQGALEKEKSHVADFAPEVAWVTRSGKTELAEPIAVRPTSETVMYPAYAKWVQSHRDLPIRLNQWCNVVRWEFKHPQPFLRTREFLWQEGHSAFATFEEAEKEVLEILDLYARVYEELLAIPVVKGRKTEKEKFAGGDYTTTVEAFISASGRAIQGGTSHHLGQNFSKMFEIIFEDPKAPGEKQFAFQNSWGLTTRTIGVLTMVHGDNMGLVLPPHVACVQVVIIPCGITNALSEEDREALIAKCNDYRKRLLSVNIRVRVDLRDNYSPGWKFNHWELKGVPIRLELGPRDMKSCQFVAVRRDTGEKLTVTENEAETTLQTILEDIQSNLYTRASEGLKTHMVVANTMEDFQKALDSGKIAQIPFCGEIDCEDWIKKTTARDQDLEPGAPSMGAKSLCIPFKPLCELQPGAKCLCGKNPAKYYTLFGRSY

SEQ ID NO: 83 - protein, 1512 aa, Artificial Sequence
  EPRS XP_007521381.1
MATLSLTVNYGDPPLGALLAVEHVKDNVKIAIEEGKENILRVSENVVFTDINSMLRYLARVATTVGLYGSNQMEHTEIDHWLEFSATKLSSHSLFTSAINELNLCLSLRTYLVGNSLSLADLCVWATLKGNAAWQEQLKQNKAPVHVKRWFGFLEAQQAFQSVGTKWNVPTTKAKAASEKKQDVGKFIELPGAEMGKVTVRFPPEASGYLHIGHAKAALLNQHYQVNFKGKLIMRFDDTNPEKEKEDFEKVILEDVAMLHIKPDQFTYTSDHFETIMKYAEKLIQEGKAYVDDTPAEQMKAEREQRLDSKHRNNSVEKNLQMWEEMKKGSQFGQSCCLRAKIDMSSNNGCMRDPTLYRCKIQPHPRTGSKYNVYPTYDFACPIVDSLEGVTHALRTTEYHDRDEQFYWIIEALDIRKPYIWEYSRLNLNNTVLSKRKLTWFVNEGLVDGWDDPRFPTVRGVLRRGMTVEGLKQFIAAQGSSRSVVNMEWDKIWAFNKKVIDPVAPRYVALLKKEVVPVNVPEAQEEMKEVAKHPKNPDVGLKPVWYGPKVFIEGADADTLSEGEMVTFINWGNISITKIHRNTDGKIVSLDAKLNLENKDYKKTTKITWLAETVRALPVPAICVTYEHLITKPVLGKDEDFKQYINKNTKHEELMLGDPCLKDLKKGDIIQLQRRGFFICDQPYEPVSPFSCKEAPCILIYIPDGHTKEMPTSGSKEKNKTETIKNETTASFKEKQTPPLNNSCAVSEDSLVLYNRVAAQGDTVRELKTKKAAKEEVDTAVKQLLALKAEYKEKTGQEYKPGNPPAAATQNASLGSSESLQDSKSLYNEVAAQGEVVRKLKAEKAPKAKVNEAVECLLSLKAQYKEKTGKEYVPGQPPISQSSDSKPNKNSEPSGPETTEAKALFDKVASQGEVVRKLKAEKASKDQVDTAVQELLQLKAQYKSLTGVEYKPVSAVGADDKDKKKKEKENKSEKQSKPQKQNDGQKKDLSKNQGSGVSPSGSGEGQGPKKQTRLGLEAKKEENLADWYSQVITKSEMIEYYDVSGCYILRPWAYSIWEFIKDFFDAEIKKLGVENCYFPMFVSQGALEKEKTHVADFAPEVAWVTRSGKTELAEPIAVRPTSETVMYPAYAKWVQSHRDLPIRLNQWCNVVRWEFKHPQPFLRTREFLWQEGHSAFATYEEAAKEVLEILDLYAQVYEELLAIPVVKGRKTEKEKFAGGDYTTTVEAFISASGRAIQGATSHHLGQNFSKMFEIMFEDPKTSGEKQFAYQNSWGLTTRTIGVMTMVHGDNMGLVLPPRVACVQVVVIPCGITNALSEEDRVALIAKCNDYRRRLLSVAIRVRVDLRDNYSPGWKFNHWELKGVPIRLEVGPRDLKSCQFVAVRRDTGEKLTVAESEAEAKLQATLEDIHQNLFTRASEDLKTHMVVADTMEDFQKELDSGKIVQIPFCGEIDCEDWIKKTTARDQDLEPGAPSMGAKSLCIPFKPLCELKPGAKCICSKNPAKYYTLFGRSY

SEQ ID NO: 84 - protein, 1519 aa, Artificial Sequence
  EPRS XP_005335921.1
MATLCLTVNSGDPPLEALLVVEHVKGDVSISVEEGKENILRVSENVVFTDINSILRYLARVATTAGLYGTNLMEHTEVDHWLEFSTTKLSSCDLFASAISELNHCLSLRTYLVGNSMTLADLCVWATLKGNAAWQEQFKQNKTPVHVKRWFGFLEAQQAFRSVGAKWDVSTNKARVAPEKKQDVGKFIELPGAEMGKVTVRFPPEASGYLHIGHAKAALLNQHYQVNFKGKLIMRFDDTNPEKEKEDFEKVILEDVALLHIKPDQFTYTSDHFETIMKYAEKLIQEGKAYVDDTPAEQMKAEREQRIESKHRKNSIEKNLQMWEEMKKGSQFGQSCCLRAKIDMSSNNGCMRDPTLYRCKIQPHPRTGNKYNVYPTYDFACPIVDSIEGVTHALRTTEYHDRDEQFYWIIEALGIRKPYIWEYSRLNLNNTVLSKRKLTWFVNEGLVDGWDDPRFPTVRGVLRRGMTVEGLKQFIAAQGSSRSVVNMEWDKIWAFNKKLRALCKKVIDPVAPRYVALLKKEVIPVNVLEAQEEMKEVAKHPKNPDVGLKPVWYSPKVFIEGADAETFSEGEMVTFINWGNIIITKIYKNADGKIVSLDAKLNLENKDYKKTTKITWLAETTHALPVPAICVTYEHLITKPVLGKDEDFKQYVNKNSKHEELMLGDPCLKDLKKGDIIQLQRRGFFICDQPYEPVSPYSCKEAPCILIYIPDGHTKEMPTFGSKEKAKVETTKNEKTAPLKERPAPSLNNTCVTSEDSLVLYNRVAIQGDVVRELKAKKAAKDDIDAAVKQLLALKAEFKEKTGQEYKPGNPPTTVVQSVSSTSPANTSESKSLYDKVAAQGEVVRKLKAEKAPKTKVNEAVECLLSLKAEYKEKTGKDYIPGQPPSSQSSDSNPIRNSDTAGPETPEAKVLFDKVASQGEVVRKLKAEKVSKDQIDTAVQELLQLKAQYKSLTGVEYKPVSATGAEDKDKKKKEKENKSEKQNKPSKQNDGQGKDSNKTQGSGLSSGGAGEGQGPKKQTRLGLEAKKEENLAEWYSQVITKSEMIEYYDVSGCYILRPWSYSIWESIKDFFDAEIKKLGVENCYFPIFVSQGALEKERTHVADFAPEVAWVTRSGKTELAEPIAIRPTSETVMYPAYAKWVQSHRDLPIRLNQWCNVVRWEFKHPQPFLRTREFLWQEGHSAFATFEEAAEEVLKILELYARVYEELLAIPVVKGRKTEKEKFAGGDYTTTIEAFISASGRAIQGATSHHLGQNFSKMCEIIFEDPKTPGEKQFAYQCSWGLTTRTIGVMIMVHGDNMGLILPPRVACVQVVVIPCGITNALSEEDKEALIAKCNDYQKRLHSVNIRVKVDLRDNYSPGWKFNHWELKGVPIRLEVGPRDMKSCQFVAVRRDTGEKLTIAENEAETKIHAILEDIQVNLFTRACEELKTHMVVANTLEDLQKVLDSGKIAQIPFCGEIDCEDWIKKTTARDQDLEPGAPSMGAKSLCIPFKPLCELQPGAKCICGKNPAKFYTLFGRSY

SEQ ID NO: 85 - protein, 1512 aa, Artificial Sequence
  EPRS XP_008148043.1
  misc_feature (1362)..(1366): Xaa is any amino acid
MATLCLTVNSGDPPLGALLAVEHVKDNVSIFVEEGKENILRVSENVVFTDINSILRYLARVAMTARLYGSNLMEHTEIDHWLEFSATKLSSCNLFPSAINELNHCLSLRTYLVGNSLSLADLCVWATLKGNVAWQEQLQQNSAPVHVKRWFGFLEAQQAFQSVGTKWNVSATKAKGAPQKKPDVGKFVELPGAEMGKVTVRFPPEASGYLHIGHAKAALLNQHYQVNFKGKLIMRFDDTNPEKEKEDFEKVILEDVAMLHIEPDQFTYTSDHFETIMKYAEKLIQEGKAYVDDTPAERMKAEREQRTESKHRNNSVEKNLQMWEEMKKGSPFGQTCCLRAKIDMNSNNGCMRDPTLYRCKIQPHPRTGNRYNVYPTYDFACPIVDSVEGVTHALRTTEYHDRDEQFYWFIEALGIRKPYIWEYSRLNLNNTVLSKRKLTWFVNEGLVDGWDDPRFPTVRGVLRRGMTVEGLKQFIAAQGSSRSVVNMEWDKIWAFNKKVIDPVAPRYVALLQKEVIPVHVPDAQEEMKEVAKHPKNPDVGLKPVWYSPRVFIEGADAETLSEGEMVTFINWGNINITKIHKNANGKIVSLDAKLNLENKDYKKTTKITWLAETAHALPIPAICVTYEHLITKPVLGKDEDFKQYVNKNSKHEELMLGDPCLKDLKKGDIIQLQRRGFFICDQPYEPVSPHSCREAPCVLIYIPDGHTKEMPTSGSKEKTKVETVKNETTTPVKERPAPPTNASATSGDPLALYNRVAAQGDVVRELKAKKAAKEDVDAAVKQLLALKAEYKEKTGQEYKPGSPPAVAARAVSSPSPASPPGGGSLYDEVAAQGEVVRKLKAEKAPKAKVNEAVECLLSLKAQYKEKTGQEYVPGQPPLPHGSGSSPARSSEPCGPETAEAKVLFDQVASQGEVVRKLKAEKASKDQVDAAVQELLQRKAQYKSLTGVEYKPVSATGAEDKDKKKKEKENKSEKQNKPPKQSDGSKKEPAKSQGGGGLPPSGAGEGPGPRKQTRLGLEAKKEENLADWYSQVITKSEMIEYYDVSGCYILRPWAFSIWESIKDFFDAEIKKLGVENCYFPMFVSQSALETEKTHVADFAPEVAWVTRSGKTELAEPIAVRPTSETVMYPAYAKWVQSHRDLPIRLNQWCNVVRWEFKHPQPFLRTREFLWQEGHSAFATFEEAAVEVLQILDLYAQVYEELLAIPVVKGRKTEKEKFAGGDYTTTVEAFISASGRAIQGATSHHLGQNFSKMFEIVFEDPKTPGEKQFAYQNSWGLTTRTIGVMTMVHGDNMGLVLPPRVACVQVVVIPCGITNTLSEEDRDALIAKCNDYRRRLLSVNIRVRADLRDNYSPGWKFNHWELKXXXXXLEVGPRDMKSCQFVAVRRDTGEKLTVAENEAETKLQALLEDIHANLFRKASEDLKTHMVVANSMEDFQKLLDSGKIVQIPFCGEIDCEDWIKKTTARDQDLEPGAPSMGAKSLCIPFKPLCELQPGARCVCGKNPAKYYTLFGRSY

SEQ ID NO: 86 - protein, 1497 aa, Artificial Sequence
  EPRS XP_004439743.1
MAALCLTVNSGDPPLGALLAVEHVKGSVSISVEEGKENILRVSENVVFTDVNSILRYLARVATTAGLYGSNLMEHTEIDHWLEFSATKLSSCDLFTSAINELNHCLSLRTFLVGNSLSLADLCVWATLKGNAAWQEQVNQGKAPVHVKRWFGFLEAQQAFQSVGTKWNVSATKAKVAPEKKQDVGKFVELPGAEMGKVTVRFPPEASGYLHIGHAKAALLNQHYQVNFKGKLIMRFDDTNPEKEKEDFEKVILEDVAMLHIKPDQFTYTSDHFETIMKYAEKLIQEGKAYVDDTPAEQMKAEREQRIESKHRENSIEKNLQMWEEMKKGSQLGQSCCLRAKIDMSSNNGCMRDPTLYRCKIQPHPRTGNKYNVYPTYDFACPIVDSIEGVTHALRTTEYHDRDEQFYWIIEALGIRKPYIWEYSRLNLNNTVLSKRKLTWFVNEGLVDGWYVYCYLYLEGSKDGSSRSVVNMEWDKIWAFNKKVIDPVAPRYVALLKEEVVPVSIPEAQEEMKEVAKHPKNPDVGLKPVWYSPKVFIEGADAETLSEGEMVTFINWGNINITKIHKNADGKILSLDAQLNLENKDYKKTTKITWLAETARALPVPAVCVTYEHLITKPVLGKDEDFKQYVNTNSKHEELMLGDPCLKDLKKGDIIQLQRRGFFICDQPYEPVSPYSCREAPCVLIFIPDGHTKEMPTSGSKEKTKVEMTKSETATPFKEKPAPSLNNTCATSEESLVLYNRVAAQGDVVRELKAKKAAKEDTDAAVKQLLALKAEYKEKTGQEYKPGNPPAAVVQNVSSKSSASILEIKSLHDAVAAQGEVVRKLKAEKAPKAEVNEAVESLLSLKAQYKEKTGKDYIPGQPPLSQSSDSSPSRSSEPSGPETPEAKVLFDKVASQGEVVRKLKAEKASKDQVDTAVQELLQLKAQYKSLTGVEYKPVSITGAEDRDKRKKEKENKSEKQNKPQKQNDGPKKDLFKNQGSGLSSSGPGEGQGPKKQTRLGLEAKKEENLADWYSQVITKSEMIEYYDVSGCYVLRPWAYAIWESIKDFFDAEIKKLGIENCYFPMFVSQGALEKEKTHIADFAPEVAWVTRSGKTELAEPIAIRPTSETVMYPAYAKWVQSHRDLPIRLNQWCNVVRWEFKHPQPFLRTREFLWQEGHSAFATFEEAAEEVLQILDLYAQIYEELLAIPVVKGRKTEKEKFAGGDYTTTIEAFISASGRAIQGGTSHHLGQNFSKMFEIVFEDPKTPGEKQFAYQNSWGLTTRTIGVMTMVHGDNMGLVLPPRVACVQVVVIPCGITNALSEEDRDALIAKCNDYRRRLLSVNIRVKVDLRDNYSPGWKFNHWELKGVPIRLEVGPRDMKSCQFVAVRRDTGEKLTVAENEAETKLQAILEDIHVNLFTKASEDLKTHMVVANTMEDFQKVLDSGKIAQIPFCGEIDCEDWIKKTTARDQDLEPGAPSMGAKSLCIPFRPLCELQPGTKCVCGKTPAKFYTLFGRSY

SEQ ID NO: 87 - protein, 1514 aa, Artificial Sequence
  EPRS XP_004685497.1
MATLCLTVNTGDPPLGALLAVEHVKDNVSISVEEGKENILRVSENVVFTDVNSILRYLARVATTAGLYGTNQLEHTEIDHWLEFSATKLSSCSLFTSAVNELNLCLSLRTYLVGNSLSLADFCVWATLKGSAAWQEQLQQHGAPVHVKRWFGFLEAQEAFQSVGTKWNASATRAKVAPEKRQDVGKFVELPGAEMGKVTVRFPPEASGYLHIGHAKAALLNQHYQVNFKGKLIMRFDDTNPEKEKEDFEKVILEDVAMLHIKPDQFTYTSDHFETIMKYAEKLIREGKAYVDDTPAEQMKAEREQRAESKHRKNSIEKNLQMWEEMKKGSQFGQSCCLRAKIDMSSNNGCMRDPTLYRCKIQPHPRTGNKYNVYPTYDFACPIVDSIEGVTHALRTTEYHDRDEQFYWIIEALGIRKPYIWEYSRLNLNNTVLSKRKLTWFVNEGLVDGWDDPRFPTVRGVLRRGMTVEGLKQFIAAQGSSRSVVNMEWDKIWAFNKKVIDPVAPRFVALLKKEVIPVSIPEAREEMKEVAKHPKNPDVGLKPIWYSPKIYIEGADADTLSEGEMVTFINWGNININKIHKNADGKIVSLDAKLNLENKDYKKTTKITWLAETTQALPIPAICVTYEHLITKPVLGKDEDFKQYVNKNSKREELMLGDPCLKDLKKGDIIQLQRRGFFICDQPYEPVSPYSCREAPCVLIYIPDGHTKEMPTSGSKEKTKVETKNEVTSGFYRDERPESSSTNLGATCEDSLVLYNRVALQGDVVRELKAKKAAKEDIDAAVKELLTLKAEYKEKTGQEYKPGSPPAAAAQDAPCKPSASALDSKSLYDEVAAQGEVVRKLKAEKAPKAKVSEAVECLLSLKAQYKEKTGKDYIPGQPPVSQTPPSSLTNNNSKPVGPETPEAKVLFDKVASQGEVVRKLKAEKASKDQVDTAVQELLQLKSQYKSLTGVEYKPVSATGTEDKDKKKKEKENKSEKQNKSQKQNDGQKKEPSKNQGSGPSSGGSGEGQGPKKQTRLGLEAKKEENLADWYSQVITKSEMIEYYDVSGCYILRPWAFSIWESIKDFFDAEIKKLGVENCYFPMFVSQGALETEKTHIADFAPEVAWVTRSGKTELAEPIAIRPTSETVMYPSYAKWVQSHRDLPIRLNQWCNVVRWEFKHPQPFLRTREFLWQEGHSAFATYEEAAEEVLQILDLYAQVYEDLLAIPVVKGRKTEKEKFAGGDYTTTLEAFISASGRAIQGATSHHLGQNFSKMFEIIFEDPKAPGEKQFAYQNSWGLTTRTIGVMTMVHGDNMGLVLPPRVACVQVVVIPCGITNALAEEDKEALIAKCNEYRRRLLSVNVRVRVDLRDNYSPGWKFNHWELKGVPIRLEVGPRDMKTCQFVAVRRDTGEKLTVAEHEAETKLQALLEDIHISLFTRASEDLKAHMVVANTMEEFQKALDSGKIVQIPFCGEIDCEDWIKKTTARDQDLEPGAPSMGAKSLCIPFKPLHELQPGARCVCGKNTAKYYTLFGRSY

SEQ ID NO: 88 - protein, 1510 aa, Artificial Sequence
  EPRS XP_004578688.1
MAALCLTVNSGDPPLGALLAVEHLKGDVSISVEEGKENILRVSENVVFTDINSILRYMARVANRVGLYGSNLLEHTEIDHWLEFSATKLSSCDMFPSAVSELNHCLSLRTYLVGNSLSLADLCVWATLKGSTAWQEQLKENKTPVHVKRWFGFLDAQQAFQSVGSKWGVSVNKANKAPEKKQDIGKFVELPGAEMGKVTVRFPPEASGYLHIGHAKAALLNQHYQVNFKGKLIMRFDDTNPEKEKEDFEKVILEDVAMLHIKPDQFTYTSDHFETIMKYAEKLIQEGKAYVDDTPAEQMKAEREQRLESKHRRNSIEKNLQMWEEMKKGSQFGQTCCLRAKIDMNSNNGCMRDPTLYRCKIQPHPRTGSKYNVYPTYDFACPIVDSIEGVTHALRTTEYHDRDEQFYWIIEALGIRKPYIWEYSRLNLNNTVLSKRKLTWFVNEGLVDGWDDPRFPTVRGVLRRGMTVEGLKQFIAAQGSSRSVVNMEWDKIWAFNKKVIDPVAPRYVALLKKEVVPVNVPEAQEEMKEVAKHPKNPDVGLKPVWYSPKIFIEGADAETLSEGEMVTFINWGNINITKIHKNADGKILALDAKLNLENKDYKKTTKLTWLAETAHALPIPAICVTYEHLITKPVLGKDEDFKQYVNKDSKREELMLGDPCLKDLRKGDIIQLQRRGFFICDQPYEPVSPYSCKEAPCILIYIPDGHTKEMPTFGSKEKTKGEAIKTEKTPVKEKPAPALTSACAASEDPVLLYSRVAAQGDVVRELKTKKAAKEDIDTAVKKLLALKAEYKEKTGQEYKPGNPPAAVGHSSSTSSASVLESKSLYDEVAAQGEVVRKLKAEKAPKAKVNEAVERLLSLKAEYKEKTGKEYVPGQPPLSQSTDSKPAGNSEPAGPETSDAKALFDRVACQGEVVRKLKAEKASKDQIDAAVQELLQLKAQYKSLTGVEYKPVSATGAEDKDKKKKEKENKSEKQNKPQKQNDGQKKDASKSQGSGLSSSGAGEGQGPKKQTRLGLEAKKEENLADWYSQVITKSEMIEYYDVSGCYILRPWAYSIWESIKDFFDAEIKKLGVENCYFPIFVSQSALEKEKTHVADFAPEVAWVTRSGKTELAEPIAIRPTSETVMYPAYAKWVQSHRDLPIRLNQWCNVVRWEFKHPQPFLRTREFLWQEGHSAFATFEEAAEEVLQILDLYVRVYEELLAIPVVKGRKTEKEKFAGGDYTTTIEAFISSSGRAIQGATSHHLGQNFSKMCEIVFEDPKTPGEKQFAYQCSWGLTTRTIGVMVMVHGDNMGLVLPPRVASVQVVVIPCGITNALSEEDREALVAKCNDYRRRLLSVSIRVRADLRDNYSPGWKFNHWELKGVPIRLEVGPRDMKNCQFVAVRRDTGEKLTIAENEAETKLQTILEDIQANLFARASEDLRTHMVVADTMEEFQKILDSGKIAQIPFCGEIECEDWIKKTTARDQDLEPGAPSMGAKSLCIPFKPLRELQPGAKCICGKNPAKFYTLFGRSY

SEQ ID NO: 89 - protein, 1452 aa, Artificial Sequence
  EPRS XP_005879946.1
MTAKLYGSNLMEHTEIDHWLEFSATKLSSCNLFPSAINELNHCLSLRTYLVGNSLSLADLCVWATLKGNVAWQEQLQQNRAPVHVKRWFGFLEAQQAFQSVGTKWNVSATKAKGAPQKKPDVGKFVELPGAEMGKVTVRFPPEASGYLHIGHAKAALLNQHYQVNFKGKLIMRFDDTNPEKEKEDFEKVILEDVAMLHIEPDQFTYTSDHFETIMKYAEKLIQEGKAYVDDTPAERMKAEREQRTESKHRNNSVEKNLQMWEEMKKGSPFGQSCCLRAKIDMNSNNGCMRDPTLYRCKIQPHPRTGNRYNVYPTYDFACPIVDSIEGVTHALRTTEYHDRDEQFYWIIEALGIRKPYIWEYSRLNLNNTVLSKRKLTWFVDEGLVDGWDDPRFPTVRGVLRRGMTVEGLKQFIAAQGSSRSVVNMEWDKIWAFNKKVIDPVAPRYVALLKKEVIPVHVPGAQEEMKEVAKHPKNPDVGLKPVWYSPRVFIEGADAETLSEGEMVTFINWGNINITKIHKNANGKIVSLDAKLNLENKDYKKTTKITWLAETAHALPIPAICVTYEHLITKPVLGKDEDFKQYVNKNSKHEELMLGDPCLKDLKKGDIIQLQRRGFFICDQPYEPVSPHSCREAPCVLIFIPDGHTKEMPTSGSKEKTKVETVKNETTTPVKERPVAPLTNTSAASEGPMVLYNKVAAQGDVVRELKAKKAAKEDVDAAVKHLLALKAEYKEKTGQEYKPGSPPAAAAAQAVSSPSSASPPGGRSLYDEVAAQGEVVRKLKAEKAPKAKVNEAVECLLSLKAQYKEKTGQEYVPGQPPLPLGSGSSPARSSEPCGPETAEAKVLFDQVASQGEVVRKLKAEKASKDQVDAAVQELLQRKAQYKSLTGVEYKPVSATGAEDKDKKKKEKENKSEKQNKPQKQNDGSKKEPSRGQGGGGLPPSGAGEGQGPRKQTRLGLEAKKEENLADWYSQVITKSEMIEYYDVSGCYILRPWAFSIWESIKDFFDAEIKKLGVENCYFPMFVSQSALEKEKTHVADFAPEVAWVTRSGKTELAEPIAVRPTSETVMYPAYAKWVQSHRDLPIRLNQWCNVVRWEFKHPQPFLRTREFLWQEGHSAFATFEEAAAEVLQILDLYAQVYEELLAIPVVKGRKTEKEKFAGGDYTTTVEAFISASGRAIQGATSHHLGQNFSKMFEIIFEDPKMPGEKQFAYQNSWGLTTRTIGVMTMVHGDNMGLVLPPRVACVQVVVIPCGITTALSEEDRDALIAKCNDYRRRLLSVNIRARADLRDNYSPGWKFNHWELKGVPIRLEVGPRDMKSCQFVAVRRDTGEKLTVTENEAETKLQALLEDIHANLFRKASEDLKTHMVVANSMEDFQKLLDSGKIVQIPFCGEIDCEDWIKKTTARDQDLEPGAPSMGAKSLCIPFKPLCELQPGARCVCGKNPAKYYTLFGRSY

SEQ ID NO: 90 - protein, 1512 aa, Artificial Sequence
  EPRS XP_008825021.1
MAALSLTVDAGAPPLEALLAAEHVKGDVSVSVEEGKENLLRVSENVVFTDVNSILRYLARVATTAGLYGTNLMEHTEIDHWLEFSATKLSSCDLFTSAVDELNHCLSLRTYLVGNSLTLADLCVWATLKGNAVWQEQLKQNKTPIHVKRWFSFLEAHQAFRSVGAKWDVSANKARVVPDKKQDIGKFVELPGAEMGKVTVRFPPEASGYLHIGHAKAALLNQHYQVNFKGKLIMRFDDTNPEKEKEDFEKVILEDVAMLHIKPDQFTYTSDHFETIMKYAEKLIQEGKAYVDDTPAEQMKVEREQRTESRHRENSVERNLQMWEEMKKGSQFGQSCCLRAKIDMSSNNGCMRDPTLYRCKIQPHPRTGNKYNVYPTYDFACPIVDSIEGVTHALRTTEYHDRDEQFYWIIEALGIRKPYIWEYSRLNLNNTVLSKRKLTWFVNEGLVDGWDDPRFPTVRGVLRRGMTVEGLKQFIAAQGSSRSVVNMEWDKIWAFNKKVIDPVAPRYVALLKKEVIPVYVPEAREEMKEVARHPKNPDVGLKPVWYSPKVFIEGADAETFSEGEMVTFINWGNINITKIHKNADGKILSLDAKLNLENKDYKKTTKITWLAETSHTPPVPAVCVTYEHLITKPVLGKDEDFKQYVNRDSKHEELMLGDPCLKDLKKGDIIQLQRRGFFICDQPYEPVSPYSCKEAPCVLIYIPDGHTKEMPKSGSKEKTKVETTRKETLSPLKEKLAASLNNSCATTEDSSVLYKRVAVQGDVVRELKAKKAAKEDVDAAVKQLLALKAEYKEKTGQEYKPGNPPAAVLQNVSTKSSSAVENTSLYDKVAAQGEVVRKLKAEKAPKAKVNEAVECLLSLKAEYKEKTGKDYVPGQPPSSQSSNPSLGSNADPAGPETPEAKVLFDQVACQGEVVRKLKAEKASKDQVDAAVQELLQLKAQYKSLTGVEYKPVTATGAEDKDKKKKEKENKSEKQNKPQKQNDGQGKDSSRNQGSGGLSPSGAGEGQGPKKQTRLGLEAKKEENLAEWYSQVITKSEMIEYYDVSGCYILRPWSYSIWESIKDFFDAEIKKLGVENCYFPIFVSQGALEKEKTHIADFAPEVAWVTRSGKTELAEPIAIRPTSETVMYPAYAKWVQSHRDLPIRLNQWCNVVRWEFKHPQPFLRTREFLWQEGHSAFATFEEAAEEVLQILELYAQVYEELLAIPVVKGRKTEKEKFAGGDYTTTIEAFISASGRAIQGATSHHLGQNFSKMCEIIFEDPKTPGEKQFAYQCSWGLTTRTIGVMIMVHGDNMGLVLPPRVACVQVVVIPCGITNALSEDDREALMAKCSEYQRRLLSANIRVRVDLRDNYSPGWKFNHWELKGVPIRLEVGPRDMKTCQFVAVRRDTGEKLTIAEKEAETKLQAILEDIQLNLFTRASEDLRTHMVVANTLEDFQKALDSGKIAQIPFCGEIDCEDWIKKTTARDQDVEPGAPSMGAKSLCIPFKPLCELQPGAKCICGKNPAKFYTLFGRSY

SEQ ID NO: 91 - protein, 1519 aa, Artificial Sequence
  EPRS XP_008825020.1
MAALSLTVDAGAPPLEALLAAEHVKGDVSVSVEEGKENLLRVSENVVFTDVNSILRYLARVATTAGLYGTNLMEHTEIDHWLEFSATKLSSCDLFTSAVDELNHCLSLRTYLVGNSLTLADLCVWATLKGNAVWQEQLKQNKTPIHVKRWFSFLEAHQAFRSVGAKWDVSANKARVVPDKKQDIGKFVELPGAEMGKVTVRFPPEASGYLHIGHAKAALLNQHYQVNFKGKLIMRFDDTNPEKEKEDFEKVILEDVAMLHIKPDQFTYTSDHFETIMKYAEKLIQEGKAYVDDTPAEQMKVEREQRTESRHRENSVERNLQMWEEMKKGSQFGQSCCLRAKIDMSSNNGCMRDPTLYRCKIQPHPRTGNKYNVYPTYDFACPIVDSIEGVTHALRTTEYHDRDEQFYWIIEALGIRKPYIWEYSRLNLNNTVLSKRKLTWFVNEGLVDGWDDPRFPTVRGVLRRGMTVEGLKQFIAAQGSSRSVVNMEWDKIWAFNKKLRALCKKVIDPVAPRYVALLKKEVIPVYVPEAREEMKEVARHPKNPDVGLKPVWYSPKVFIEGADAETFSEGEMVTFINWGNINITKIHKNADGKILSLDAKLNLENKDYKKTTKITWLAETSHTPPVPAVCVTYEHLITKPVLGKDEDFKQYVNRDSKHEELMLGDPCLKDLKKGDIIQLQRRGFFICDQPYEPVSPYSCKEAPCVLIYIPDGHTKEMPKSGSKEKTKVETTRKETLSPLKEKLAASLNNSCATTEDSSVLYKRVAVQGDVVRELKAKKAAKEDVDAAVKQLLALKAEYKEKTGQEYKPGNPPAAVLQNVSTKSSSAVENTSLYDKVAAQGEVVRKLKAEKAPKAKVNEAVECLLSLKAEYKEKTGKDYVPGQPPSSQSSNPSLGSNADPAGPETPEAKVLFDQVACQGEVVRKLKAEKASKDQVDAAVQELLQLKAQYKSLTGVEYKPVTATGAEDKDKKKKEKENKSEKQNKPQKQNDGQGKDSSRNQGSGGLSPSGAGEGQGPKKQTRLGLEAKKEENLAEWYSQVITKSEMIEYYDVSGCYILRPWSYSIWESIKDFFDAEIKKLGVENCYFPIFVSQGALEKEKTHIADFAPEVAWVTRSGKTELAEPIAIRPTSETVMYPAYAKWVQSHRDLPIRLNQWCNVVRWEFKHPQPFLRTREFLWQEGHSAFATFEEAAEEVLQILELYAQVYEELLAIPVVKGRKTEKEKFAGGDYTTTIEAFISASGRAIQGATSHHLGQNFSKMCEIIFEDPKTPGEKQFAYQCSWGLTTRTIGVMIMVHGDNMGLVLPPRVACVQVVVIPCGITNALSEDDREALMAKCSEYQRRLLSANIRVRVDLRDNYSPGWKFNHWELKGVPIRLEVGPRDMKTCQFVAVRRDTGEKLTIAEKEAETKLQAILEDIQLNLFTRASEDLRTHMVVANTLEDFQKALDSGKIAQIPFCGEIDCEDWIKKTTARDQDVEPGAPSMGAKSLCIPFKPLCELQPGAKCICGKNPAKFYTLFGRSY

SEQ ID NO: 92 - protein, 1511 aa, Artificial Sequence
  EPRS XP_004699962.1
MATLCLTVNPGDPPLGALLAVEHVKDNISISVEEGKENILRVSENVMFTDINSILRYLARVATAAGLYGSNLMEHTEIDHWMEFSATKLSSCNLFTSAVDELNHCLSLRTYLVGNSLSLADVCVWATLKGKATWQEQLKQNKAPVHVKRWFGFLESQKAFQSVGSKWDVSPTRPKVVPEQKKQDVGKFVELPGAEMGKVTVRFPPEASGYLHIGHAKAALLNQHYQVNFKGKLIMRFDDTNPEKEKEDFEKVILEDVAMLHIKPDQFTYTSDHFETIMKYAEKLIQEGKAYVDDTPAEQMKVEREQRIESKHRKNSVEKNLQMWEEMKKGSQFGQSCCLRAKIDMSSNNGCMRDPALYRCKIQPHPRTGNKYNVYPTYDFACPIVDSIEGVTHALRTTEYHDRDEQFYWIIEALGIRKPYIWEYSRLNLNNTVLSKRKLTWFVNEGLVDGWDDPRFPTVRGVLRRGMTVEGLKQFIAAQGSSRSVVNMEWDKIWAFNKKVIDPVAPRYVALLKKEVIPVNIPEAQEDMKEVAKHPKNPDVGLKPVWYSPKVLIEGADAETLSEGEMVTFINWGNINITKIHKTKDGKIVSLDAKLNLENKDFKKTTKITWLAETGRALPVPAVCVTYEHLITKPVLGKDEDFKQYVNKSSKREELMLGDPCLKDLKKGDIIQLQRRGFFICDQPYEPVSPYSCREAPCILVYIPDGHTKEMPTSGSKDKNKVETTKSETTPCKEKQSLSLDNNYAAPVDSMALYNQVAVQGDVVRELKAKKAAKEDIDVAVKQLLALKAEYKEKTGQEYKPGKPPAAVASSSTSSNSPHSVRDGKSLYDEVAAQGEVVRKLKAEKAPKAKVTEAVECLLSLKAQYKETTGKEYVPGQPALSQNSASESSSEPSGPETPEAKGLFDQVASQGEVVRKLKGEKAPKDQVDRAVQELLQLKAQYKSLTGVEYKPVSATGSEDKDKRKKEKENKSEKQNKPQKQNDGQKKDSSKNQGSGQSSGGPGEGQGPKKQTRLGLEAKKEENLADWYSQVITKSEMIEYYDVSGCYILRPWAYSIWESIKNFFDAEIKKLGVENCYFPMFVSQGALEKEKNHVADFAPEVAWVTRSGKTELAEPIAVRPTSETVMYPAYAKWVQSHRDLPIRLNQWCNVVRWEFKHPQPFLRTREFLWQEGHSAFATFEEAAKEVLQILDLYAQVYEELLAIPVVKGRKTEKEKFAGGDYTTTIEAFISASGRAIQGATSHHLGQNFSKMFEIIFEDPRTPGEKQFAYQNSWGLTTRTIGVLTMVHGDNMGLVLPPRVACVQVVIIPCGITNALSEEDREALIAKCNDYQKRLLSVNIRVRTDLRDNYSPGWKFNHWELKGVPIRLEVGPRDIKSCQFVAVRRDTGEKLTVTENEAETKLQAILEDIQVNLYTRASEDLKTHMAVANTVEDFQKALDSGKIVQIPFCGEIDCEDWIKKTTARDQDLEPGAPSMGAKSLCIPFKPLCELQLGAKCICGKNLAKYYTLFGRSY

SEQ ID NO: 93 - protein, 1519 aa, Artificial Sequence
  EPRS XP_006140298.1
MATLCLTVNSGDPPLGALLAVEHVKNDIRISVEEGKENVLRVSENVMFTDVNSILRYLARVATTTGLYGSNMMEHAEIDHWLEFSATKLSSCDLCTSAINELDLCLSLRTYLVGNSLSLADLCVWATLKGNAAWQEQLKQNKAPVHVKRWFGFLEAQQVFQSVGTKWNVSTTKTTVAPEKKQDIGKFVELPGAEMGKVTVRFPPEASGYLHIGHAKAALLNQHYQVNFKGKLIMRFDDTNPEKEKEDFEKVILEDVAMLHIKPDQFTYTSDHFETIMKYAEKLIQEGKAYVDDTPAEQMKAEREQRMESKHRKNSVEKNLQMWEEMKKGSQFGQSCCLRAKIDMSSNNGCMRDPTLYRCKIQPHPRTGSKYNVYPTYDFACPIVDSIEGVTHALRTTEYHDRDEQFYWIIEALGIRKPYIWEYSRLNLNNTVLSKRKLTWFVNEGLVDGWDDPRFPTVRGVLRRGMTVEGLKQFIAAQGSSRSVVNMEWDKIWAFNKKVIDPVAPRYVALLKKEVIPVNIPEAQEEMKEVAKHPKNPDVGLKPVWYSSRVFIEGADAETFSEGEMVTFINWGNINITKIHKNTDGKIVSLDAKLNLENKDYKKTTKITWLAETTHALPIPAICVTYEHLITKPVLGKDEDFKQYVNKNSKHEELMLGDPCLKTLKKGDIIQLQRRGFFICDQPYEPVSPYSCKEAPCILIYIPDGHTKEMPTSGSKEKTKVETKNETTPLFKGRPAPSLNNTCATSEDSLVLYNRVAAQGDVVRELKTKKAAKEDIDAAVKQLLALKAEFKEKTGQEYKPGNPPAAVVENISSKSSSILESKSLYDEVAAQGEVVRKLKAEKAPKAKVNEAVECLLSLKAQYKEKTGKEYIPGQPPCSQSSDSSPARNSEPAGPETPEAKVLFEKVASQGEAVRKLKAEKASKDQIDPAVQELLQLKAQYKSLTGVEYKPVSATGAEDKDKKKKEKENKSEKQNKPQKQNDGQRKESSKNQGSGLSSGGAGEGQGPKKQTRLGLEAKKEENLADWYSQVITKSEMIEYYDVSGCYILRPWAYSIWESIKDFFDAEIKKLGVENCYFPMFVSQGALEKEKTHIADFAPEVAWVTRSGKTELAEPIAIRPTSETVMYPAYAKWVQSHRDLPIRLNQWCNVVRWEFKHPQPLLRTREFLWQEGHSAFASFEEAAEEVLQILDLYARVYEELLAIPVVKGRKTEKEKFAGGDYTTTVEAFISASGRAIQGATSHHLGQNFSKMFEIIFEDPKTPGEKQFAYQNSWGLTTRTIGVMTMVHGDNMGLVLPPRVACVQVVVIPCGITNALSEEDKEALIAKCNDYRRRLLSADIRVRVDLRDNYSPGWKFNHWELKKGKLKTREVVSGIGRSEMFSRDLTAMTEVNVIYLCARRPSMCLKLTIAQHCFVFILFILFLARASEDLKTHMIVANSMEDFQKALDSGKIVQIPFCGEIDCEDWIKKTTARDQDLEPGAPSMGAKSLCIPFKPLCELQPGAKCICDKNPAKYYTLFGRSY

SEQ ID NO: 94 - protein, 1556 aa, Artificial Sequence
  EPRS XP_007642504.1
MLARGSLLTPRAPVVEARSIPNRSFQGASAIALDFRKSAFSLLWEIARNHGNKSLVLSFLDALLAVEHVKGDVSVSVEEGKENLLRVSEDVVFTDINSILRYLARVATTSGLYGTNLMEHTEIDHWLEFSATKLSSCAALTSALTELNHCLSLRTYLVGNSLTLADLCVWATLKGNAAWQEQLEQNKTLVHVKRWFGFLEAQQAFRSVGTKWDVSENKARVVPDKKQDVGKFVELPGAEMGKVTVRFPPEASGYLHIGHAKAALLNQHYQVNFKGKLIMRFDDTNPEKEKEDFEKVILEDVAMLHIKPDQFTYTSDHFETIMKYAEKLIQEGKAYVDDTPAEQMKAEREQRAESKHRQNSVEKNLQMWEEMKKGSPFGQSCCLRAKIDMSSNNGCMRDPTLYRCKIQPHPRTGNKYNVYPTYDFACPIVDSIEGVTHALRTTEYHDRDEQFYWIIEALGIRKPYIWEYSRLNLNNTVLSKRKLTWFVNEGLVDGWDDPRFPTVRGVLRRGMTVEGLKQFIAAQGSSRSVVNMEWDKIWAFNKKVIDPVAPRYVALLKKEVVPVNVPEAQEEMKEVARHPKNPDVGLKPVWYSPKVFIEGADAETFSEGEMVTFINWGNINITKIHKNADGKITSLDAKLNLENKDYKKTTKITWLAETTHALPIPAICVTYEHLITKPVLGKDEDFKQYVNKDSKHEELMLGDPCLKDLKKGDIIQLQRRGFFICDQPYEPVSPYSCKEAPCILIYIPDGHTKEMPTSGSKEKTKAEPLKKETSSAPKEGPVPAVSPCAASEESSVLYNRVAAQGDVVRELKAKKAAKEDVDAAVKQLLALKAEYKQKTGQEYKPGNPPSAAAQSASTKSLPSAGEDRSLYDKIAAQGEVVRKLKAEKAPKAKVTEAVECLLSLKAEYKEKTGKEYVPGQPPASQKSQPSPASKAEPAGPETTEAKALFDRVACQGEVVRKLKAEKASKDQVDPAVQELLQLKAQYKSLTGIEYKPVSATGSEDKDKKKKEKENKSEKQNKPQKQNDGPGKDSSKSQGGGLSSSGAGEGQGPKKQTRLGLEAKKEENLAEWYSQVITKSEMIEYYDVSGCYILRPWSYSIWESIKDFFDTEIKKLGVENCYFPIFVSQAALEKEKSHIEDFAPEVAWVTRSGKTELAEPIAIRPTSETVMYPAYAKWVQSHRDLPIRLNQWCNVVRWEFKHPQPFLRTREFLWQEGHSAFATFEEAADEVMQILELYARVYEELLAIPVVRGRKTEKEKFAGGDYTTTVEAFISASGRAIQGATSHHLGQNFSKMCEIVFEDPKTPGEKQFAFQCSWGLTTRTIGVMIMVHGDNMGLVLPPRVACVQVVVIPCGITNALSEEDREALMAKCNEYRKRLLGVNIRVRVDLRDNYSPGWKFNHWELKGVPVRLEVGPRDMKSCQFVAVRRDTGEKLTIAEKEAESKLQEILEDIQLNLFTRASEDLKTHMVVSNTLEDFQKVLDSGKIAQIPFCGEIDCEDWIKKTTARDQDVEPGAPSMGAKSLCIPFTPLCELQPGAMCVCGKNPAKFYTLFGRSY

SEQ ID NO: 95 - protein, 1505 aa, Artificial Sequence
  EPRS ERE73005.1
MALTRSLFLYALLAVEHVKGDVSVSVEEGKENLLRVSEDVVFTDINSILRYLARVATTSGLYGTNLMEHTEIDHWLEFSATKLSSCAALTSALTELNHCLSLRTYLVGNSLTLADLCVWATLKGNAAWQEQLEQNKTLVHVKRWFGFLEAQQAFRSVGTKWDVSENKARVVPDKKQDVGKFVELPGAEMGKVTVRFPPEASGYLHIGHAKAALLNQHYQVNFKGKLIMRFDDTNPEKEKEDFEKVILEDVAMLHIKPDQFTYTSDHFETIMKYAEKLIQEGKAYVDDTPAEQMKAEREQRAESKHRQNSVEKNLQMWEEMKKGSPFGQSCCLRAKIDMSSNNGCMRDPTLYRCKIQPHPRTGNKYNVYPTYDFACPIVDSIEGVTHALRTTEYHDRDEQFYWIIEALGIRKPYIWEYSRLNLNNTVLSKRKLTWFVNEGLVDGWDDPRFPTVRGVLRRGMTVEGLKQFIAAQGSSRSVVNMEWDKIWAFNKKVIDPVAPRYVALLKKEVVPVNVPEAQEEMKEVARHPKNPDVGLKPVWYSPKVFIEGADAETFSEGEMVTFINWGNINITKIHKNADGKITSLDAKLNLENKDYKKTTKITWLAETTHALPIPAICVTYEHLITKPVLGKDEDFKQYVNKDSKHEELMLGDPCLKDLKKGDIIQLQRRGFFICDQPYEPVSPYSCKEAPCILIYIPDGHTKEMPTSGSKEKTKAEPLKKETSSAPKEGPVPAVSPCAASEESSVLYNRVAAQGDVVRELKAKKAAKEDVDAAVKQLLALKAEYKQKTGQEYKPGNPPSAAAQSASTKSLPSAGEDRSLYDKIAAQGEVVRKLKAEKAPKAKVTEAVECLLSLKAEYKEKTGKEYVPGQPPASQKSQPSPASKAEPAGPETTEAKALFDRVACQGEVVRKLKAEKASKDQVDPAVQELLQLKAQYKSLTGIEYKPVSATGSEDKDKKKKEKENKSEKQNKPQKQNDGPGKDSSKSQGGGLSSSGAGEGQGPKKQTRLGLEAKKEENLAEWYSQVITKSEMIEYYDVSGCYILRPWSYSIWESIKDFFDTEIKKLGVENCYFPIFVSQAALEKEKSHIEDFAPEVAWVTRSGKTELAEPIAIRPTSETVMYPAYAKWVQSHRDLPIRLNQWCNVVRWEFKHPQPFLRTREFLWQEGHSAFATFEEAADEVMQILELYARVYEELLAIPVVRGRKTEKEKFAGGDYTTTVEAFISASGRAIQGATSHHLGQNFSKMCEIVFEDPKTPGEKQFAFQCSWGLTTRTIGVMIMVHGDNMGLVLPPRVACVQVVVIPCGITNALSEEDREALMAKCNEYRKRLLGVNIRVRVDLRDNYSPGWKFNHWELKGVPVRLEVGPRDMKSCQFVAVRRDTGEKLTIAEKEAESKLQEILEDIQLNLFTRASEDLKTHMVVSNTLEDFQKVLDSGKIAQIPFCGEIDCEDWIKKTTARDQDVEPGAPSMGAKSLCIPFTPLCELQPGAMCVCGKNPAKFYTLFGRSY

SEQ ID NO: 96 - protein, 1477 aa, Artificial Sequence
  EPRS AAH94679.1
KENLLRVSETVAFTDVNSILRYLARIATTSGLYGTNLMEHTEIDHWLEFSATKLSSCDRLTSAINELNHCLSLRTYLVGNSLTLADLCVWATLKGSAAWQEHLKQNKTLVHVKRWFGFLEAQQAFRSVGTKWDVSGNRATVAPDKKQDVGKFVELPGAEMGKVTVRFPPEASGYLHIGHAKAALLNQHYQVNFKGKLIMRFDDTNPEKEKEDFEKVILEDVAMLHIKPDQFTYTSDHFETIMKYAEKLIQEGKAYVDDTPAEQMKAEREQRTESKHRKNSVEKNLQMWEEMKKGSQFGQSCCLRAKIDMSSNNGCMRDPTLYRCKIQPHPRTGNKYNVYPTYDFACPIVDSIEGVTHALRTTEYHDRDEQFYWIIEALGIRKPYIWEYSRLNLNNTVLSKRKLTWFVNEGLVDGWDDPRFPTVRGVLRRGMTVEGLKQFIAAQGSSRSVVNMEWDKIWAFNKKVIDPVAPRYVALLKKEVVPVNVLDAQEEMKEVARHPKNPDVGLKPVWYSPKVFIEGADAETFSEGEMVTFINWGNINITKIHKNADGKITSLDAKLNLENKDYKKTTKITWLAESTHALSIPAVCVTYEHLITKPVLGKDEDFKQYINKDSKHEELMLGDPCLKDLKKGDIIQLQRRGFFICDQPYEPVSPYSCREAPCILIYIPDGHTKEMPTSGSKEKTKVEISKKETSSAPKERPAPAVSSTCATAEDSSVLYSRVAVQGDVVRELKAKKAPKEDIDAAVKQLLTLKAEYKEKTGQEYKPGNPSAAAVQTVSTKSSSNTVESTSLYNKVAAQGEVVRKLKAEKAPKAKVTEAVECLLSLKAEYKEKTGKDYVPGQPPASQNSHSNPVSNAQPAGAEKPEAKVLFDRVACQGEVVRKLKAEKASKDQVDSAVQELLQLKAQYKSLTGIEYKPVSATGAEDKDKKKKEKENKSEKQNKPQKQNDGQGKDSSKSQGSGLSSGGAGEGQGPKKQTRLGLEAKKEENLAEWYSQVITKSEMIEYYDVSGCYILRPWSYSIWESIKDFFDAEIKKLGVENCYFPIFVSQAALEKEKNHIEDFAPEVAWVTRSGKTELAEPIAIRPTSETVMYPAYAKWVQSHRDLPVRLNQWCNVVRWEFKHPQPFLRTREFLWQEGHSAFATFEEAADEVLQILELYARVYEELLAIPVVRGRKTEKEKFAGGDYTTTIEAFISASGRAIQGATSHHLGQNFSKMCEIVFEDPKTPGEKQFAYQCSWGLTTRTIGVMVMVHGDSMGLVLPPRVASVQVVVIPCGITNALSEEDREALMAKCNEYRRRLLGANIRVRVDLRDNYSPGWKFNHWELKGVPVRLEVGPRDMKSCQFVAVRRDTGEKLTIAEKEAEAKLEKVLEDIQLNLFTRASEDLKTHMVVSNTLEDFQKVLDAGKVAQIPFCGEIDCEDWIKKMTARDQDVEPGAPSMGAKSLCIPFNPLCELQPGAMCVCGKNPAKFYTLFGRSY

SEQ ID NO: 97 - protein, 1468 aa, Artificial Sequence
  EPRS EDL13067.1
TVAFTDVNSILRYLARIATTPGLYGTNLMEHTEIDHWLEFSATKLSSCDGLTSAINELNHCLSLRTYLVGNSLTLADLCVWATLKGSAAWQEHLKQNKTLVHVKRWFGFLEAQQAFRSVGTKWDVSGSRATVAPDKKQDVGKFVELPGAEMGKVTVRFPPEASGYLHIGHAKAALLNQHYQVNFKGKLIMRFDDTNPEKEKEDFEKVILEDVAMLHIKPDQFTYTSDHFETIMKYAEKLIQEGKAYVDDTPAEQMKAEREQRTESKHRKNSVEKNLQMWEEMKKGSQFGQSCCLRAKIDMSSNNGCMRDPTLYRCKIQPHPRTGNKYNVYPTYDFACPIVDSIEGVTHALRTTEYHDRDEQFYWIIEALGIRKPYIWEYSRLNLNNTVLSKRKLTWFVNEGLVDGWDDPRFPTVRGVLRRGMTVEGLKQFIAAQGSSRSVVNMEWDKIWAFNKKVIDPVAPRYVALLKKEVVPVNVLDAQEEMKEVARHPKNPDVGLKPVWYSPKVFIEGADAETFSEGEMVTFINWGNINITKIHKNADGKITSLDAKLNLENKDYKKTTKITWLAESTHALPIPAVCVTYEHLITKPVLGKDEDFKQYINKDSKHEELMLGDPCLKDLKKGDIIQLQRRGFFICDQPYEPVSPYSCREAPCILIYIPDGHTKEMPTSGSKEKTKVEISKKETSSAPKERPAPAVSSTCATAEDSSVLYSRVAVQGDVVRELKAKKAPKEDIDAAVKQLLTLKAEYKEKTGQEYKPGNPSAAAVQTVSTKSSSNTVESTSLYNKVAAQGEVVRKLKAEKAPKAKVTEAVECLLSLKAEYKEKTGKDYVPGQPPASQNSHSNPVSNAQPAGAEKPEAKVLFDRVACQGEVVRKLKAEKASKDQVDSAVQELLQLKAQYKSLTGIEYKPVSATGAEDKDKKKKEKENKSEKQNKPQKQNDGQGKDSSKSQGSGLSSGGAGEGQGPKKQTRLGLEAKKEENLAEWYSQVITKSEMIEYYDVSGCYILRPWSYSIWESIKDFFDAEIKKLGVENCYFPIFVSQAALEKEKNHIEDFAPEVAWVTRSGKTELAEPIAIRPTSETVMYPAYAKWVQSHRDLPVRLNQWCNVVRWEFKHPQPFLRTREFLWQEGHSAFATFEEAADEVLQILELYARVYEELLAIPVVRGRKTEKEKFAGGDYTTTIEAFISASGRAIQGATSHHLGQNFSKMCEIVFEDPKTPGEKQFAYQCSWGLTTRTIGVMVMVHGDNMGLVLPPRVASVQVVVIPCGITNALSEEDREALMAKCNEYRRRLLGANIRVRVDLRDNYSPGWKFNHWELKGVPVRLEVGPRDMKSCQFVAVRRDTGEKLTIAEKEAEAKLEKVLEDIQLNLFTRASEDLKTHMVVSNTLEDFQKVLDAGKVAQIPFCGEIDCEDWIKKMTARDQDVEPGAPSMGAKSLCIPFNPLCELQPGAMCVCGKNPAKFYTLFGRSY

SEQ ID NO: 98 - protein, 1447 aa, Artificial Sequence
  EPRS XP_008825022.1
MEHTEIDHWLEFSATKLSSCDLFTSAVDELNHCLSLRTYLVGNSLTLADLCVWATLKGNAVWQEQLKQNKTPIHVKRWFSFLEAHQAFRSVGAKWDVSANKARVVPDKKQDIGKFVELPGAEMGKVTVRFPPEASGYLHIGHAKAALLNQHYQVNFKGKLIMRFDDTNPEKEKEDFEKVILEDVAMLHIKPDQFTYTSDHFETIMKYAEKLIQEGKAYVDDTPAEQMKVEREQRTESRHRENSVERNLQMWEEMKKGSQFGQSCCLRAKIDMSSNNGCMRDPTLYRCKIQPHPRTGNKYNVYPTYDFACPIVDSIEGVTHALRTTEYHDRDEQFYWIIEALGIRKPYIWEYSRLNLNNTVLSKRKLTWFVNEGLVDGWDDPRFPTVRGVLRRGMTVEGLKQFIAAQGSSRSVVNMEWDKIWAFNKKLRALCKKVIDPVAPRYVALLKKEVIPVYVPEAREEMKEVARHPKNPDVGLKPVWYSPKVFIEGADAETFSEGEMVTFINWGNINITKIHKNADGKILSLDAKLNLENKDYKKTTKITWLAETSHTPPVPAVCVTYEHLITKPVLGKDEDFKQYVNRDSKHEELMLGDPCLKDLKKGDIIQLQRRGFFICDQPYEPVSPYSCKEAPCVLIYIPDGHTKEMPKSGSKEKTKVETTRKETLSPLKEKLAASLNNSCATTEDSSVLYKRVAVQGDVVRELKAKKAAKEDVDAAVKQLLALKAEYKEKTGQEYKPGNPPAAVLQNVSTKSSSAVENTSLYDKVAAQGEVVRKLKAEKAPKAKVNEAVECLLSLKAEYKEKTGKDYVPGQPPSSQSSNPSLGSNADPAGPETPEAKVLFDQVACQGEVVRKLKAEKASKDQVDAAVQELLQLKAQYKSLTGVEYKPVTATGAEDKDKKKKEKENKSEKQNKPQKQNDGQGKDSSRNQGSGGLSPSGAGEGQGPKKQTRLGLEAKKEENLAEWYSQVITKSEMIEYYDVSGCYILRPWSYSIWESIKDFFDAEIKKLGVENCYFPIFVSQGALEKEKTHIADFAPEVAWVTRSGKTELAEPIAIRPTSETVMYPAYAKWVQSHRDLPIRLNQWCNVVRWEFKHPQPFLRTREFLWQEGHSAFATFEEAAEEVLQILELYAQVYEELLAIPVVKGRKTEKEKFAGGDYTTTIEAFISASGRAIQGATSHHLGQNFSKMCEIIFEDPKTPGEKQFAYQCSWGLTTRTIGVMIMVHGDNMGLVLPPRVACVQVVVIPCGITNALSEDDREALMAKCSEYQRRLLSANIRVRVDLRDNYSPGWKFNHWELKGVPIRLEVGPRDMKTCQFVAVRRDTGEKLTIAEKEAETKLQAILEDIQLNLFTRASEDLRTHMVVANTLEDFQKALDSGKIAQIPFCGEIDCEDWIKKTTARDQDVEPGAPSMGAKSLCIPFKPLCELQPGAKCICGKNPAKFYTLFGRSY

SEQ ID NO: 99 - protein, 1512 aa, Artificial Sequence
  EPRS XP_005348894.1
MAALCLTVNAGDPPLEALLAVEHVKGDVSISVEEGKENLLRVSESVVFTDINSILRYLARVAATSGLYGTNLMEHTEIDHWLEFSATKLSSCAALTSALNELNHCLSLRTYLVGNSLTLADLCVWAALKGNAAWQEQVEQNKTLVHVKRWFGFLEAQQAFRSVGTKWDFSENKARVAPDKKQDVGKFVELPGAEMGKVTVRFPPEASGYLHIGHAKAALLNQHYQVNFKGKLIMRFDDTNPEKEKEDFEKVILEDVAMLHIKPDQFTYTSDHFETIMKYAEKLIQEGKAYVDDTPAEQMKMEREQRAESKHRQNSVEKNLQMWEEMKKGSQFGQSCCLRAKIDMSSNNGCMRDPTLYRCKIQPHPRTGNKYNVYPTYDFACPIVDSIEGVTHALRTTEYHDRDEQFYWIIEALGIRKPYIWEYSRLNLNNTVLSKRKLTWFVNEGLVDGWDDPRFPTVRGVLRRGMTVEGLKQFIAAQGSSRSVVNMEWDKIWAFNKKVIDPVAPRYVALLKKEVVPVHVPDAQEEMKEVARHPKNPDVGLKPVWYSPKVFIEGADAETFSEGEMVTFINWGNINITKIHKNADGKITSLDAKLNLENKDYKKTTKITWLAETSHALPIPAVCVTYEHLITKPVLGKDEDFKQYVNKDSKHEELMLGDPCLKDLKKGDIIQLQRRGFFICDQQYEPVSPYSCKEAPCILIYIPDGHTKEMPTSGSKEKTKVETSKKETSSAPKEKTVPAVSSTSAAPEDSAVLYNRVALQGDVVRELKAKKAAKEDIDAAVKQLLALKAEYKQKTGQEYKPGNPCIAAVQSVSTKSPSSTVENPSLYDKVAAQGEIVRKLKAEKAPKAKINEAVECLLSLKAEYKEKTGKEYVPGQPPMSQKSQSSAVSGAEPAGPETPEAKGLFDRVARQGEVVRKLKAEKASKDQVDSAVQELLQLKAQYKSLTGVEYKPVSAAGSEDRDKKKKEKENKSEKQNKPQKQNDGPGKDSSKSQGNGLSPSGAGEGQGPKKQTRLGLEAKKEENLAEWYSQVITKSEMIEYYDVSGCYILRPWSYSIWEFIKDFFDAEIKKLGVENCYFPIFVSQAALEKEKNHIEDFAPEVAWVTRSGKTELAEPIAIRPTSETVMYPAYAKWVQSHRDLPVRLNQWCNVVRWEFKHPQPFLRTREFLWQEGHSAFATFEEAADEVLQILELYARVYEELLAIPVVRGRKTEKEKFAGGDYTTTLEAFISASGRAIQGATSHHLGQNFSKMCEIVFEDPKIPGEKQFAFQCSWGLTTRTIGVMVMVHGDNMGLVLPPRVASVQVVVIPCGITNALSEEDREALMAKCNEYRRRLLGANIRVRVDLRDNYSPGWKFNHWELKGVPVRLEVGPRDMKSSQFVAVRRDTGEKLTIAEKEAEAKLQEILEDIQLNLFTRATEDLKAHMVVSNTLEDFQKALDSGKIAQIPFCGEIDCEDWIKKTTARDQDVEPGAPSMGAKSLCIPFNPLCELQPGAMCICGKKPAKFYTLFGRSY

SEQ ID NO: 100 - protein, 1512 aa, Artificial Sequence
  EPRS AAI41050.1
MAALCLTVNAGNPPLEALLAVEHVKGDVSISVEEGKENLLRVSETVAFTDVNSILRYLARIATTSGLYGTNLMEHTEIDHWLEFSATKLSSCDGLTSAINELNHCLSLRTYLVGNSLTLADLCVWATLKGSAAWQEHLKQNKTLVHVKRWFGFLEAQQAFRSVGTKWDVSGSRATVAPDKKQDVGKFVELPGAEMGKVTVRFPPEASGYLHIGHAKAALLNQHYQVNFKGKLIMRFDDTNPEKEKEDFEKVILEDVAMLHIKPDQFTYTSDHFETIMKYAEKLIQEGKAYVDDTPAEQMKAEREQRTESKHRKNSVEKNLQMWEEMKKGSQFGQSCCLRAKIDMSSNNGCMRDPTLYRCKIQPHPRTGNKYNVYPTYDFACPIVDSIEGVTHALRTTEYHDRDEQFYWIIEALGIRKPYIWEYSRLNLNNTVLSKRKLTWFVNEGLVDGWDDPRFPTVRGVLRRGMTVEGLKQFIAAQGSSRSVVNMEWDKIWAFNKKVIDPVAPRYVALLKKEVVPVNVLDAQEEMKEVARHPKNPDVGLKPVWYSPKVFIEGADAETFSEGEMVTFINWGNINITKIHKNADGKITSLDAKLNLENKDYKKTTKITWLAESTHALPIPAVCVTYEHLITKPVLGKDEDFKQYINKDSKHEELMLGDPCLKDLKKGDIIQLQRRGFFICDQPYEPVSPYSCREAPCILIYIPDGHTKEMPTSGSKEKTKVEISKKETSSAPKERPAPAVSSTCATAEDSSVLYSRVAVQGDVVRELKAKKAPKEDIDAAVKQLLTLKAEYKEKTGQEYKPGNPSAAAVQTVSTKSSSNTVESTSLYNKVAAQGEVVRKLKAEKAPKAKVTEAVECLLSLKAEYKEKTGKDYVPGQPPASQNSHSNPVSNAQPAGAEKPEAKVLFDRVACQGEVVRKLKAEKASKDQVDSAVQELLQLKAQYKSLTGIEYKPVSATGAEDKDKKKKEKENKSEKQNKPQKQNDGQGKDSSKSQGSGLSSGGAGEGQGPKKQTRLGLEAKKEENLAEWYSQVITKSEMIEYYDVSGCYILRPWSYSIWESIKDFFDAEIKKLGVENCYFPIFVSQAALEKEKNHIEDFAPEVAWVTRSGKTELAEPIAIRPTSETVMYPAYAKWVQSHRDLPVRLNQWCNVVRWEFKHPQPFLRTREFLWQEGHSAFATFEEAADEVLQILELYARVYEELLAIPVVRGRKTEKEKFAGGDYTTTIEAFISASGRAIQGATSHHLGQNFSKMCEIVFEDPKTPGEKQFAYQCSWGLTTRTIGVMVMVHGDNMGLVLPPRVASVQVVVIPCGITNALSEEDREALMAKCNEYRRRLLGANIRVRVDLRDNYSPGWKFNHWELKGVPVRLEVGPRDMKSCQFVAVRRDTGEKLTIAEKEAEAKLEKVLEDIQLNLFTRASEDLKTHMVVSNTLEDFQKVLDAGKVAQIPFCGEIDCEDWIKKMTARDQDVEPGAPSMGAKSLCIPFNPLCELQPGAMCVCGKNPAKFYTLFGRSY

SEQ ID NO: 101 - protein, 1512 aa, Artificial Sequence
  EPRS NP_084011.1
MAALCLTVNAGNPPLEALLAVEHVKGDVSISVEEGKENLLRVSETVAFTDVNSILRYLARIATTSGLYGTNLMEHTEIDHWLEFSATKLSSCDRLTSAINELNHCLSLRTYLVGNSLTLADLCVWATLKGSAAWQEHLKQNKTLVHVKRWFGFLEAQQAFRSVGTKWDVSGNRATVAPDKKQDVGKFVELPGAEMGKVTVRFPPEASGYLHIGHAKAALLNQHYQVNFKGKLIMRFDDTNPEKEKEDFEKVILEDVAMLHIKPDQFTYTSDHFETIMKYAEKLIQEGKAYVDDTPAEQMKAEREQRTESKHRKNSVEKNLQMWEEMKKGSQFGQSCCLRAKIDMSSNNGCMRDPTLYRCKIQPHPRTGNKYNVYPTYDFACPIVDSIEGVTHALRTTEYHDRDEQFYWIIEALGIRKPYIWEYSRLNLNNTVLSKRKLTWFVNEGLVDGWDDPRFPTVRGVLRRGMTVEGLKQFIAAQGSSRSVVNMEWDKIWAFNKKVIDPVAPRYVALLKKEVVPVNVLDAQEEMKEVARHPKNPDVGLKPVWYSPKVFIEGADAETFSEGEMVTFINWGNINITKIHKNADGKITSLDAKLNLENKDYKKTTKITWLAESTHALSIPAVCVTYEHLITKPVLGKDEDFKQYINKDSKHEELMLGDPCLKDLKKGDIIQLQRRGFFICDQPYEPVSPYSCREAPCILIYIPDGHTKEMPTSGSKEKTKVEISKKETSSAPKERPAPAVSSTCATAEDSSVLYSRVAVQGDVVRELKAKKAPKEDIDAAVKQLLTLKAEYKEKTGQEYKPGNPSAAAVQTVSTKSSSNTVESTSLYNKVAAQGEVVRKLKAEKAPKAKVTEAVECLLSLKAEYKEKTGKDYVPGQPPASQNSHSNPVSNAQPAGAEKPEAKVLFDRVACQGEVVRKLKAEKASKDQVDSAVQELLQLKAQYKSLTGIEYKPVSATGAEDKDKKKKEKENKSEKQNKPQKQNDGQGKDSSKSQGSGLSSGGAGEGQGPKKQTRLGLEAKKEENLAEWYSQVITKSEMIEYYDVSGCYILRPWSYSIWESIKDFFDAEIKKLGVENCYFPIFVSQAALEKEKNHIEDFAPEVAWVTRSGKTELAEPIAIRPTSETVMYPAYAKWVQSHRDLPVRLNQWCNVVRWEFKHPQPFLRTREFLWQEGHSAFATFEEAADEVLQILELYARVYEELLAIPVVRGRKTEKEKFAGGDYTTTIEAFISASGRAIQGATSHHLGQNFSKMCEIVFEDPKTPGEKQFAYQCSWGLTTRTIGVMVMVHGDNMGLVLPPRVASVQVVVIPCGITNALSEEDREALMAKCNEYRRRLLGANIRVRVDLRDNYSPGWKFNHWELKGVPVRLEVGPRDMKSCQFVAVRRDTGEKLTIAEKEAEAKLEKVLEDIQLNLFTRASEDLKTHMVVSNTLEDFQKVLDAGKVAQIPFCGEIDCEDWIKKMTARDQDVEPGAPSMGAKSLCIPFNPLCELQPGAMCVCGKNPAKFYTLFGRSY

SEQ ID NO: 102 - protein, 1519 aa, Artificial Sequence
  EPRS XP_006497180.1
MAALCLTVNAGNPPLEALLAVEHVKGDVSISVEEGKENLLRVSETVAFTDVNSILRYLARIATTSGLYGTNLMEHTEIDHWLEFSATKLSSCDRLTSAINELNHCLSLRTYLVGNSLTLADLCVWATLKGSAAWQEHLKQNKTLVHVKRWFGFLEAQQAFRSVGTKWDVSGNRATVAPDKKQDVGKFVELPGAEMGKVTVRFPPEASGYLHIGHAKAALLNQHYQVNFKGKLIMRFDDTNPEKEKEDFEKVILEDVAMLHIKPDQFTYTSDHFETIMKYAEKLIQEGKAYVDDTPAEQMKAEREQRTESKHRKNSVEKNLQMWEEMKKGSQFGQSCCLRAKIDMSSNNGCMRDPTLYRCKIQPHPRTGNKYNVYPTYDFACPIVDSIEGVTHALRTTEYHDRDEQFYWIIEALGIRKPYIWEYSRLNLNNTVLSKRKLTWFVNEGLVDGWDDPRFPTVRGVLRRGMTVEGLKQFIAAQGSSRSVVNMEWDKIWAFNKKLRALCKKVIDPVAPRYVALLKKEVVPVNVLDAQEEMKEVARHPKNPDVGLKPVWYSPKVFIEGADAETFSEGEMVTFINWGNINITKIHKNADGKITSLDAKLNLENKDYKKTTKITWLAESTHALSIPAVCVTYEHLITKPVLGKDEDFKQYINKDSKHEELMLGDPCLKDLKKGDIIQLQRRGFFICDQPYEPVSPYSCREAPCILIYIPDGHTKEMPTSGSKEKTKVEISKKETSSAPKERPAPAVSSTCATAEDSSVLYSRVAVQGDVVRELKAKKAPKEDIDAAVKQLLTLKAEYKEKTGQEYKPGNPSAAAVQTVSTKSSSNTVESTSLYNKVAAQGEVVRKLKAEKAPKAKVTEAVECLLSLKAEYKEKTGKDYVPGQPPASQNSHSNPVSNAQPAGAEKPEAKVLFDRVACQGEVVRKLKAEKASKDQVDSAVQELLQLKAQYKSLTGIEYKPVSATGAEDKDKKKKEKENKSEKQNKPQKQNDGQGKDSSKSQGSGLSSGGAGEGQGPKKQTRLGLEAKKEENLAEWYSQVITKSEMIEYYDVSGCYILRPWSYSIWESIKDFFDAEIKKLGVENCYFPIFVSQAALEKEKNHIEDFAPEVAWVTRSGKTELAEPIAIRPTSETVMYPAYAKWVQSHRDLPVRLNQWCNVVRWEFKHPQPFLRTREFLWQEGHSAFATFEEAADEVLQILELYARVYEELLAIPVVRGRKTEKEKFAGGDYTTTIEAFISASGRAIQGATSHHLGQNFSKMCEIVFEDPKTPGEKQFAYQCSWGLTTRTIGVMVMVHGDNMGLVLPPRVASVQVVVIPCGITNALSEEDREALMAKCNEYRRRLLGANIRVRVDLRDNYSPGWKFNHWELKGVPVRLEVGPRDMKSCQFVAVRRDTGEKLTIAEKEAEAKLEKVLEDIQLNLFTRASEDLKTHMVVSNTLEDFQKVLDAGKVAQIPFCGEIDCEDWIKKMTARDQDVEPGAPSMGAKSLCIPFNPLCELQPGAMCVCGKNPAKFYTLFGRSY

SEQ ID NO: 103 - protein, 1511 aa, Artificial Sequence
  EPRS XP_005082493.1
MAALCLTVNAGDPPLDALLAVEHLKGDVSISVEEGKENLLRVSENVVFTDINLILRYLARVATTSGLYGTNLMEHTEIDHWLEFSATKLSSCAALTSALTELNHCLSLRTYLVGNSLTLADLCVWATLKGNAAWQEQLEQNRTLVHVRRWFGFLEAQQAFRSVGAKWNVSENKARVAPDKKQDVGKFIELPGAEMGKVTVRFPPEASGYLHIGHAKAALLNQHYQVNFKGKLIMRFDDTNPEKEKEDFEKVILEDVAMLHIKPDQFTYTSDHFETIMKYAEKLIEEGKAYVDDTPAEQMKAEREQRTESKHRQNSVEKNLQMWEEMKKGSPFGQSCCLRAKIDMSSNNGCMRDPTLYRCKIQPHPRTGNKYNVYPTYDFACPIVDSIEGVTHALRTTEYHDRDEQFYWIIEALGIRKPYIWEYSRLNLNNTVLSKRKLTWFVNEGLVDGWDDPRFPTVRGVLRRGMTVEGLKQFIAAQGSSRSVVNMEWDKIWAFNKKVIDPVAPRYVALLKKEVVPVNVPDAQEEMKEVARHPKNPDVGLKPVWYSPKVFIEGADAETFSEGEMVTFINWGNINITKIHKNADGKIISLDAKLNLENKDYKKTTKITWLAETAHALPIPAICVTYEHLISKPVLGKDEDFKQYVNKDSKHEELMLGDPCLKDLKKGDIIQLQRRGFFICDQPYEPVSPYSCKEAPCILIYIPDGHTKEMPTSGSKEKTKAEPSKKETSSAPKEGPMPAVSICAASESSSTLYSRVAAQGDVVRDLKAKKAAKEDIDAAVKQLLALKAEYKQKTGHEYKPGNPPTAPAQSASTEPPPSAVEDGSLYDKVAAQGEVVRKLKAEKAPKAKVNEAVECLLSLKAEYKEKTGKEYVPGQPPAPQRSQPSPARTAEPAGAETAEARALFDRVACQGEVVRKLKAEKASKGQVDSAVQELLQLKAQYKSLTGIEYKPVSATGSEDKDKKKKEKENKSEKQNKPQKQNDGQGKDSSKSQGSGLSSSGAGEGQGPKKQTRLGLEAKKEENLAEWYSQVITKSEMIEYYDVSGCYILRPWSYSIWESIKDFFDAEIKKLGVENCYFPIFVSQAALEKEKSHIEDFAPEVAWVTRSGKTELAEPIAIRPTSETVMYPAYAKWVQSHRDLPIRLNQWCNVVRWEFKHPQPFLRTREFLWQEGHSAFATFEEAADEVLQILELYARVYEELLAIPVVRGRKTEKEKFAGGDYTTTVEAFISASGRAIQGATSHHLGQNFSKMCEIVFEDPKTPGEKQFAFQCSWGLTTRTIGVMIMVHGDNMGLVLPPRVACVQVVVIPCGITNALSEEDREALMAKCNEYQRRLLGANIRVRVDLRDNYSPGWKFNHWELKGVPVRLEVGPRDMKSCQFVAVRRDTGEKLTIAEKEAETKLQEVLEDIQLNLFTRASEDLKTHMVVSNTLEDFQKVLDSGKIAQIPFCGEIDCEDWIKKTTARDQDMEPGAPSMGAKSLCIPFNPLCELQPGAMCVCGKNAAKYYTLFGRSY

SEQ ID NO: 104 - protein, 1520 aa, Artificial Sequence
  EPRS ERE73006.1
MALTRSLFLYALLAVEHVKGDVSVSVEEGKENLLRVSEDVVFTDINSILRYLARVATTSGLYGTNLMEHTEIDHWLEFSATKLSSCAALTSALTELNHCLSLRTYLVGNSLTLADLCVWATLKGNAAWQEQLEQNKTLVHVKRWFGFLEAQQAFRSVGTKWDVSENKARVVPDKKQDVGKFVELPGAEMGKVTVRFPPEASGYLHIGHAKAALLNQHYQVNFKGKLIMRFDDTNPEKEKEDFEKVILEDVAMLHIKPDQFTYTSDHFETIMKYAEKLIQEGKAYVDDTPAEQMKAEREQRAESKHRQNSVEKNLQMWEEMKKGSPFGQSCCLRAKIDMSSNNGCMRDPTLYRCKIQPHPRTGNKYNVYPTYDFACPIVDSIEGVTHALRTTEYHDRDEQFYWIIEALGIRKPYIWEYSRLNLNNTVLSKRKLTWFVNEGLVDGWDDPRFPTVRGVLRRGMTVEGLKQFIAAQGSSRSVVNMEWDKIWAFNKKQGTIIEAMHSDLWEMVIDPVAPRYVALLKKEVVPVNVPEAQEEMKEVARHPKNPDVGLKPVWYSPKVFIEGADAETFSEGEMVTFINWGNINITKIHKNADGKITSLDAKLNLENKDYKKTTKITWLAETTHALPIPAICVTYEHLITKPVLGKDEDFKQYVNKDSKHEELMLGDPCLKDLKKGDIIQLQRRGFFICDQPYEPVSPYSCKEAPCILIYIPDGHTKEMPTSGSKEKTKAEPLKKETSSAPKEGPVPAVSPCAASEESSVLYNRVAAQGDVVRELKAKKAAKEDVDAAVKQLLALKAEYKQKTGQEYKPGNPPSAAAQSASTKSLPSAGEDRSLYDKIAAQGEVVRKLKAEKAPKAKVTEAVECLLSLKAEYKEKTGKEYVPGQPPASQKSQPSPASKAEPAGPETTEAKALFDRVACQGEVVRKLKAEKASKDQVDPAVQELLQLKAQYKSLTGIEYKPVSATGSEDKDKKKKEKENKSEKQNKPQKQNDGPGKDSSKSQGGGLSSSGAGEGQGPKKQTRLGLEAKKEENLAEWYSQVITKSEMIEYYDVSGCYILRPWSYSIWESIKDFFDTEIKKLGVENCYFPIFVSQAALEKEKSHIEDFAPEVAWVTRSGKTELAEPIAIRPTSETVMYPAYAKWVQSHRDLPIRLNQWCNVVRWEFKHPQPFLRTREFLWQEGHSAFATFEEAADEVMQILELYARVYEELLAIPVVRGRKTEKEKFAGGDYTTTVEAFISASGRAIQGATSHHLGQNFSKMCEIVFEDPKTPGEKQFAFQCSWGLTTRTIGVMIMVHGDNMGLVLPPRVACVQVVVIPCGITNALSEEDREALMAKCNEYRKRLLGVNIRVRVDLRDNYSPGWKFNHWELKGVPVRLEVGPRDMKSCQFVAVRRDTGEKLTIAEKEAESKLQEILEDIQLNLFTRASEDLKTHMVVSNTLEDFQKVLDSGKIAQIPFCGEIDCEDWIKKTTARDQDVEPGAPSMGAKSLCIPFTPLCELQPGAMCVCGKNPAKFYTLFGRSY

SEQ ID NO: 105 - protein, 1499 aa, Artificial Sequence
  EPRS XP_007636777.1
VNAGDPPLDALLAVEHVKGDVSVSVEEGKENLLRVSEDVVFTDINSILRYLARVATTSGLYGTNLMEHTEIDHWLEFSATKLSSCAALTSALTELNHCLSLRTYLVGNSLTLADLCVWATLKGNAAWQEQLEQNKTLVHVKRWFGFLEAQQAFRSVGTKWDVSENKARVVPDKKQDVGKFVELPGAEMGKVTVRFPPEASGYLHIGHAKAALLNQHYQVNFKGKLIMRFDDTNPEKEKEDFEKVILEDVAMLHIKPDQFTYTSDHFETIMKYAEKLIQEGKAYVDDTPAEQMKAEREQRAESKHRQNSVEKNLQMWEEMKKGSPFGQSCCLRAKIDMSSNNGCMRDPTLYRCKIQPHPRTGNKYNVYPTYDFACPIVDSIEGVTHALRTTEYHDRDEQFYWIIEALGIRKPYIWEYSRLNLNNTVLSKRKLTWFVNEGLVDGWDDPRFPTVRGVLRRGMTVEGLKQFIAAQGSSRSVVNMEWDKIWAFNKKVIDPVAPRYVALLKKEVVPVNVPEAQEEMKEVARHPKNPDVGLKPVWYSPKVFIEGADAETFSEGEMVTFINWGNINITKIHKNADGKITSLDAKLNLENTDWSRTCCVSKTGLDLPAICVTYEHLITKPVLGKDEDFKQYVNKDSKHEELMLGDPCLKDLKKGDIIQLQRRGFFICDQPYEPVSPYSCKEAPCILIYIPDGHTKEMPTSGSKEKTKAEPLKKETSSAPKEGPVPAVSPCAASEESSVLYNRVAAQGDVVRELKAKKAAKEDVDAAVKQLLALKAEYKQKTGQEYKPGNPPSAAAQSASTKSLPSAGEDRSLYDKIAAQGEVVRKLKAEKAPKAKVTEAVECLLSLKAEYKEKTGKEYVPGQPPASQKSQPSPASKAEPAGPETTEAKALFDRVACQGEVVRKLKAEKASKDQVDPAVQELLQLKAQYKSLTGIEYKPVSATGSEDKDKKKKEKENKSEKQNKPQKQNDGPGKDSSKSQGGGLSSSGAGEGQGPKKQTRLGLEAKKEENLAEWYSQVITKSEMIEYYDVSGCYILRPWSYSIWESIKDFFDTEIKKLGVENCYFPIFVSQAALEKEKSHIEDFAPEVAWVTRSGKTELAEPIAIRPTSETVMYPAYAKWVQSHRDLPIRLNQWCNVVRWEFKHPQPFLRTREFLWQEGHSAFATFEEAADEVMQILELYARVYEELLAIPVVRGRKTEKEKFAGGDYTTTVEAFISASGRAIQGATSHHLGQNFSKMCEIVFEDPKTPGEKQFAFQCSWGLTTRTIGVMIMVHGDNMGLVLPPRVACVQVVVIPCGITNALSEEDREALMAKCNEYRKRLLGVNIRVRVDLRDNYSPGWKFNHWELKGVPVRLEVGPRDMKSCQFVAVRRDTGEKLTIAEKEAESKLQEILEDIQLNLFTRASEDLKTHMVVSNTLEDFQKVLDSGKIAQIPFCGEIDCEDWIKKTTARDQDVEPGAPSMGAKSLCIPFTPLCELQPGAMCVCGKNPAKFYTLFGRSY

SEQ ID NO: 106 - protein, 1513 aa, Artificial Sequence
  EPRS XP_004670165.1
MATLCLTVNAGDPPLGALLAVEHVKGDVSISVEEGKENLLRVSENVVFTDVNSILRYLARAAASVGLYGMNLMEHTEIDHWLEFSATKLSSCDLFTSAINELNHCLSLRTYLVGNSLTLADLCIWATLKGNAVWQEQLKQNKTPVHIKRWFGFLDAQQAFQSVGTKWNVSANKARVAPEKKQDVGKFIELPGAEMGKVTVRFPPEASGYLHIGHAKAALLNQHYQVSFRGKLIMRFDDTNPEKEKEDFEKVILEDVAMLHIKPDQFTYTSDHFETIMKYAEKLIQEGKAYVDDTPAEQMKAEREQRVESKHRQNSVEKNLQMWEEMKKGSQFGQSCCLRAKIDMSSNNGCMRDPTLYRCKIQPHPRTGNAYNVYPTYDFACPIVDSIEGVTHALRTTEYHDRDEQFYWIIEALGIRKPYIWEYSRLNLNNTVLSKRKLTWFVNEGLVDGWDDPRFPTVRGVLRRGMTVEGLKQFIAAQGSSRSVVNMEWDKIWAFNKKVIDPVAPRYVALLKREVIPVSIPEAQEEMKEVAKHPKNPDVGLKPVWYGSKVFIEGADAETFSEGEVVTFINWGNITITKIHRNADGKIVSLDAKLNLENKDYKKTTKITWLAETCHALPVPAICVTYEHLITKPVIGKDEDFKQYVNKDSKHEELMLGDPCLKDLRKGDIIQLQRRGFFICDQPYEPVSPYSCREAPCILIYIPDGHTKEMPTFGSKEKTKVETTKKEPISPRKERPAPSQSSSFCAAAEGPVFLYNRVAVQGDAVRELKAKKAAKEEVDAAVRQLLALKAEYKEKTGQEYKPGHPPAAEVQNMSAQAPASAVESRALHEKVAAQGEVVRKLKAEKAPKAKVNEAVECLLSLKAEYKEKTGKEYIPGQPPSSQGLKSGFDSRSDPAGPETPEAKALFDKVACQGEAVRKLKAEKASKAQVGAAAQELLRLEAQHQALTGVEHKPVTAPGAEDRDKKRKEKENKSEKQNKPQKQNEGQGKDSSKSQGSGLSPSGAGEGQGPKKQTRLGLEAKKEENLAEWYSQVITKSEMIEYYDVSGCYILRPWAYSIWESIKDFFDAEIKKLGVENCYFPIFVSQGALEKEKDHIADFAPEVAWVTRSGKTDLAEPIAIRPTSETVMYPAYAKWVQSHRDLPIRLNQWCNVVRWEFKHPQPFLRTREFLWQEGHSAFATFEEAAEEVMQILELYTRVYEELLAIPVVKGRKTEKEKFAGGDYTTTVEAFISASGRAIQGGTSHHLGQNFSKMCEIVFEDPKTPGEKQFAYQCSWGLTTRTIGVMIMVHGDNMGLVLPPRVACVQVVVIPCGITNALSDEEKNALMAKCSEYQRRLLAVNIRARVDLRDNYSPGWKFNHWELKGVPVRLEVGPRDMKSCQFVAVRRDNGEKLTIAENEAETRLQALLEDIQLNLFTRASEDLRTHMVVADTLEDFQKLLDSGKIVQIPFCAEIDCEDWIKKTTARDQDLEPGAPSMGAKSLCIPFKPLCELQPGAKCICGKNPAKFYTLFGRSY

SEQ ID NO: 107 - protein, 1512 aa, Artificial Sequence
  EPRS XP_006916292.1
MATLCLTVNSGDPPLGALLAVEHVKDNVSISVEEGKENVLRVSENVVFTDINSILRYLARVAATAGLYGANLMEHAEIDHWLEFSATKLSSCDLFAAAIRELSHCLSLRTYLVGNSLSLADVCVWAALKGNAAWQGQLEQNQAPVHVKRWFGFLEAQQAFRSVGAKWTVSATKGKAAPEKKQDVGKFVELPGAEMGKVTVRFPPEASGYLHIGHAKAALLNQHYQVNFKGKLIMRFDDTNPEKEKEDFEKVILEDVAMLHIKPDQFTYTSDHFETIMKYAEKLIREGKAYVDDTPAEQMKAEREQRIESKHRSNSVEKNLQMWEEMKKGSQFGQSCCLRAKIDMSSNNGCMRDPTLYRCKTQPHPRTGSKHNVYPTYDFACPIVDSIEGVTHALRTTEYHDRDEQFYWIIEALGIRKPYIWEYSRLNLNNTVLSKRKLTWFVDEGLVDGWDDPRFPTVRGVLRRGMTVEGLKQFIAAQGSSRSVVNMEWDKIWAFNKKVIDPVAPRYVALLKKEAVLVNVPGAQEEKKEVAKHPKNPDVGLKPVWYSPRVFIEGADAETLSEGEMVTFINWGNISITKIHRNAEGKIVSLDAKLNLENRDYKKTTKITWLADTARAPPVPAVCVTYEHLITKPVLGRDEDFKQFVNRDSKHEELMLGDPCLKDLKKGDIIQLQRRGFFICDQPYEPVSPYSCREAPCVLIYIPDGHTKEMPTSGSKEKTRVESAKTETPPPAKGRPAPPATGSRAPSEDPLVLYTRVAAQGDAVRDLKAQKAAKEDIDAAVKQLLALKAEYKEKTGQEYKPGDAPAATAPSVPPASPAAVPGSQSLYEEVAAQGEVVRKLKAEKAPKAKVNEAVECLLSLKAQYKEKTGQDYVPHQPALSQSSDSSPARSSEACGPETAEAKVLFDKVASQGEVVRKLKAEKASKDQVGPAVQELLQLKAQYKALTGAEYKPVSAAGAEDKDKRKKEKENKSEKQNKPQKQSDGQKKDASKQPGSGLASGGAGEGQGPRKQTRLGLEAKKEENLADWYSQVITKSEMIEYYDVSGCYILRPWAYSIWEFIRDFFDAEIKKLGVENCYFPMFVSQGALEKEKTHVADFAPEVAWVTRSGKTELAEPIAVRPTSETVMYPAYAKWVQSHRDLPIRLNQWCNVVRWEFKHPQPFLRTREFLWQEGHSAFATFEEAAEEVLQILDLYAQVYEELLAIPVVKGRKTEKEKFAGGDYTTTVEAFVSTSGRAIQGATSHHLGQNFSKMFEIIFEDPRTPGEKQFAYQNSWGLTTRTIGVMTMVHGDNVGLVLPPRVACVQVVVIPCGITNVLSEEDRDALIAKCSDYQRRLRSVNIRVKVDSRDNYSPGWKFNHWELKGVPIRLEVGPRDMKSCQFVAVRRDTGEKLTIAENEAETKLQAILEDIHVNLFTRASEDLKTHMVVANSMEDFQKVLESGKIAQIPFCGEIDCEDWIKKTTARDQDLEPGAPSMGAKSLCIPFQPLCQLPPGARCVCGKNPAQYYTLFGRSY

SEQ ID NO: 108 - protein, 1512 aa, Artificial Sequence
  EPRS XP_006250488.1
MAALCLTVNAGNPPLEALLAVEHVKGDVSISVEEGKENLLRVSESVVFTDTNSILRYLARVAATSGLYGSNLMEHTEIDHWLEFSATKLSSCDVLTSAIKELNHCLSLRTYLVGNSLTLADLCVWATLKGNAACQEHLRQSKTLVHVNRWYGFLEAQQAFRSVGTKWDASANKATGAPDRKQDIGKFVELPGAEMGKVTVRFPPEASGYLHIGHAKAALLNQHYQVNFKGKLIMRFDDTNPEKEKEDFEKVILEDVAMLHIKPDQFTYTSDHFETIMKYAEKLIEEGKAYVDDTPADEMKAEREQRIESRHRKNPVEKNLQMWEEMKRGSQFGQSCCLRAKIDMSSNNGCMRDPTLYRCKIQPHPRTGNKYNVYPTYDFACPIVDSIEGVTHALRTTEYHDRDEQFYWIIEALGIRKPYIWEYSRLNLNNTVLSKRKLTWFVNEGLVDGWDDPRFPTVRGVLRRGMTVEGLKQFIAAQGSSRSVVNMEWDKIWAFNKKVIDPVAPRYVALLKKEVIPVNILDAQEEMKEVARHPKNPDVGLKPVWYSPKVFIEGADAETFSEGEMVTFINWGNINITKIHKNPDGKITSLDAKLNLENKDYKKTTKITWLAETTQALPVPAVCVTYEHLITKPVLGKDEDFKQYVNKDSKHEELMLGDPCLKDLKKGDIIQLQRRGFFICDQPYEPVSPYSCKEAPCILIYIPDGHTKEMPTSGSKEKTKVEISKKETGSAPKERPAAAVSAPCAAAEDAAILYSRVAVQGDAVRDLKAKKAPKEDIDAAVKQLLTLKAEYKEKTGQEYRPGNPPTAAVQTVSTKSPSNTGEYTSLYNKVAAQGELVRKLKAEKAPKAKINDAVECLLSLKAEYKEKTGKEYVPGQLPASQNSHSSPVSNAKPVGSETPEAKLLFDRVACQGEVVRKLKAEKASKDQVDSAVQELLQLKAQYKSLTGIEYKPVSATGAEDKDKKKKEKENKSEKQNKPQKQNDGQGKDSSKSQGSGLSSGGAGEGQGPKKQTRLGLEAKKEENLAEWYSQVITKSEMIEYYDVSGCYILRPWSYSIWESIKDFFDAEIKKLGVENCYFPIFVSQGALEKEKNHIADFAPEVAWVTRSGKTELAEPIAIRPTSETVMYPAYAKWVQSHRDLPIRLNQWCNVVRWEFKHPQPFLRTREFLWQEGHSAFATFEEAADEVLQILELYARVYEELLAIPVVRGRKTEKEKFAGGDYTTTLEAFISASGRAIQGATSHHLGQNFSKMCEIVFEDPKTPGEKQFAYQCSWGLTTRTIGVMIMVHGDNMGLVLPPRVASVQVVVIPCGITNTLSEEDREALMAKCNEYRRRLLGADIRARVDLRDNYSPGWKFNHWELKGVPVRLEVGPRDMKSCQFVAVRRDTGEKLTIAEKEAESKLKGVLEDIQLNLFTRASEDLKSHMVVSDTLEDFQKVLDSGKVAQIPFCGEIDCEDWIKKTTARDQDVEPGAPSMGAKSLCIPFNPLCELQPGAMCVCGKNPAKFYTLFGRSY

SEQ ID NO: 109 - protein, 1519 aa, Artificial Sequence
  EPRS XP_006250487.1
MAALCLTVNAGNPPLEALLAVEHVKGDVSISVEEGKENLLRVSESVVFTDTNSILRYLARVAATSGLYGSNLMEHTEIDHWLEFSATKLSSCDVLTSAIKELNHCLSLRTYLVGNSLTLADLCVWATLKGNAACQEHLRQSKTLVHVNRWYGFLEAQQAFRSVGTKWDASANKATGAPDRKQDIGKFVELPGAEMGKVTVRFPPEASGYLHIGHAKAALLNQHYQVNFKGKLIMRFDDTNPEKEKEDFEKVILEDVAMLHIKPDQFTYTSDHFETIMKYAEKLIEEGKAYVDDTPADEMKAEREQRIESRHRKNPVEKNLQMWEEMKRGSQFGQSCCLRAKIDMSSNNGCMRDPTLYRCKIQPHPRTGNKYNVYPTYDFACPIVDSIEGVTHALRTTEYHDRDEQFYWIIEALGIRKPYIWEYSRLNLNNTVLSKRKLTWFVNEGLVDGWDDPRFPTVRGVLRRGMTVEGLKQFIAAQGSSRSVVNMEWDKIWAFNKKLRALCKKVIDPVAPRYVALLKKEVIPVNILDAQEEMKEVARHPKNPDVGLKPVWYSPKVFIEGADAETFSEGEMVTFINWGNINITKIHKNPDGKITSLDAKLNLENKDYKKTTKITWLAETTQALPVPAVCVTYEHLITKPVLGKDEDFKQYVNKDSKHEELMLGDPCLKDLKKGDIIQLQRRGFFICDQPYEPVSPYSCKEAPCILIYIPDGHTKEMPTSGSKEKTKVEISKKETGSAPKERPAAAVSAPCAAAEDAAILYSRVAVQGDAVRDLKAKKAPKEDIDAAVKQLLTLKAEYKEKTGQEYRPGNPPTAAVQTVSTKSPSNTGEYTSLYNKVAAQGELVRKLKAEKAPKAKINDAVECLLSLKAEYKEKTGKEYVPGQLPASQNSHSSPVSNAKPVGSETPEAKLLFDRVACQGEVVRKLKAEKASKDQVDSAVQELLQLKAQYKSLTGIEYKPVSATGAEDKDKKKKEKENKSEKQNKPQKQNDGQGKDSSKSQGSGLSSGGAGEGQGPKKQTRLGLEAKKEENLAEWYSQVITKSEMIEYYDVSGCYILRPWSYSIWESIKDFFDAEIKKLGVENCYFPIFVSQGALEKEKNHIADFAPEVAWVTRSGKTELAEPIAIRPTSETVMYPAYAKWVQSHRDLPIRLNQWCNVVRWEFKHPQPFLRTREFLWQEGHSAFATFEEAADEVLQILELYARVYEELLAIPVVRGRKTEKEKFAGGDYTTTLEAFISASGRAIQGATSHHLGQNFSKMCEIVFEDPKTPGEKQFAYQCSWGLTTRTIGVMIMVHGDNMGLVLPPRVASVQVVVIPCGITNTLSEEDREALMAKCNEYRRRLLGADIRARVDLRDNYSPGWKFNHWELKGVPVRLEVGPRDMKSCQFVAVRRDTGEKLTIAEKEAESKLKGVLEDIQLNLFTRASEDLKSHMVVSDTLEDFQKVLDSGKVAQIPFCGEIDCEDWIKKTTARDQDVEPGAPSMGAKSLCIPFNPLCELQPGAMCVCGKNPAKFYTLFGRSY

SEQ ID NO: 110 - protein, 1488 aa, Artificial Sequence
  EPRS XP_006094389.1
  misc_feature (845), (865), and (874): Xaa is any amino acid
MATLCLTVNSGDPPLGALLAVEHVKDNVSIFVEEGKENILRVSENVVFTDINSILRYLARVAMTARLYGSNLMEHTEIDHWLEFSATKLSSCDLFPSAINELNHCLSLRTYLVGNSLSLADLCVWATLKGNVAWQEQLQQNRAPVHVKRWFGFLEAQQAFQSVGTKWNVSATKAKGAPQKKPDVGKFVELPGAEMGKVTVRFPPEASGFKFMAETHTDYVLGNGKVILEDVAMLHIEPDQFTYTSDHFETIMKYAEKLIQEGKAYVDDTPAERMKAEREQRTESKHRNNSVEKNLQMWEEMKKGSPFGQSCCLRAKIDMNSNNGCMRDPTLYRCKIQPHPRTGNRYNVYPTYDFACPIVDSIEGVTHALRTTEYHDRDEQFYWIIEALGIRKPYIWEYSRLNLNNTVLSKRKLTWFVDEGLVDGWDDPRFPTVRGVLRRGMTVEGLKQFIAAQGSSRSVVNMEWDKIWAFNKKVIDPVAPRYVALLKKEVIPVHVPGAQEEMKEVAKHPKNPDVGLKPVWYSPRVFIEGADAETLSEGEMVTFINWGNLNITKIHKNANGKIVSLDAKLNLENKDYKKTTKITWLAETAHALPIPAICVTYEHLITKPVLGKDEDFKQYVNKNSKHEELMLGDPCLKDLKKGDIIQLQRRGFFICDQPYEPVSPHSCREAPCVLIYIPDGHTKEMPTSGSKEKTKVETLKNETTTPVKERPAAPLTNTSAASEGPVVLYNKVAAQGDVVRELKAKKAAKEDVDAAVKQLLALKAEYKEKTGQEYKPGSPPAAAAQAVSSPSSAGPPGGRSLYDEVAAQGEVVRKLKAEKAPKAKVNEAVECLLSLKAQYKEKTGXEYVPGPAPVTHGSGSSPARXSEPCGPETXEAKVLFDQVASQGEVVRKLKAEKASKDQVDAAVQELLQRKAQYKSLTGVEYKPVSATGAEDKDKKKKEKENKSEKQNKPQKQNDGSKKEPSRGQGGGGLPPSGAGEGQGPRKQTRLGLEAKKEENLADWYSQVITKSEMIEYYDVSGCYILRPWAFSIWESIKDFFDAEIKKLGVENCYFPMFVSQSALEKEKTHVADFAPEVAWVTRSGKTELAEPIAVRPTSETVMYPAYAKWVQSHRDLPIRLNQWCNVVRWEFKHPQPFLRTREFLWQEGHSAFATFEEAAAEVLQILDLYAQVYEELLAIPVVKGRKTEKEKFAGGDYTTTVEAFISASGRAIQGATSHHLGQNFSKMFEIIFEDPKTPGEKQFAYQNSWGLTTRTIGVMTMVHGDNMGLVLPPRVACVQVVVIPCGITNALSEEDRDALIAKCNDYRRRLLSVNIRARADLRDNYSPGWKFNHWELKGVPIRLEVGPRDMKSCQFVAVRRDTGEKLTVTENEAETKLKALLEDIHANLFRKASEDLKTHMVVANSMEDFQKLLDSGKIVQIPFCGEIDCEDWIKKTTARDQDLEPGAPSMGAKSLCIPFKPLCELQPGARCVCGKNPAKYYTLFGRSY

SEQ ID NO: 111 - protein, 1513 aa, Artificial Sequence
  EPRS XP_005409334.1
MATLCLTVNAGAPPLEALLAAEHVKGDVSISVEEGKENVLRVSDNVVFTDVNSILRYLARVATTAGLYGANLMEHAEIDHWLEFSATKLSSCDLFTSAINDLNHCLSLRTFLVGNSLTLADFCVWATLKGNAAWLEESKQSKGPVHVKRWFGFLEAQRVFQSVSAKWGVVASQARGAPEKKQDVGKFVELPGAEMGKVTVRFPPEASGYLHIGHAKAALLNQHYQVNFKGKLIMRFDDTNPEKEKEDFEKVILEDVAMLHIKPDQFTYTSDHFETIMKYAEKLIKEGKAYVDDTPAEQMKAEREQRVESRHRNNSVEKNLQMWEEMKKGSQFGQSCCLRAKIDMSSNNGCMRDPTLYRCKIQPHPRTRSRYNVYPTYDFACPIVDSIEGVTHALRTTEYHDRDEQFYWIIEALGIRKPYIWEYSRLNLNNTVLSKRKLTWFVDEGLVDGWDDPRFPTVRGVLRRGMTVEGLKQFIAAQGSSRSVVNMEWDKIWAFNKKVIDPVAPRYVALLKKEVIPVNIPEAQEEMKEVAKHPKNPEVGLKPVWYGSRVLIEGADAQTLAEGEMVTFINWGNINITNIHKNADGKIVSLDGKLNLENKDYKKTTKITWLAETARALPIPAVCVTYEHLITKPVLGKDEDFKQYVNKNSKREELMLGDPCLKDLKKGDIIQLQRRGFFICDQPYEPVSPYSCKEAPCILIYIPDGHTKEMPTSGSKEKTKGEATKTEVIPAPKERAAPPVNKSCATSEASLVLHNRVAAQGDVVRELKARKAAKDDIDAAVKQLLALKAEYKEKTGQEYKPGNPPAAGALGASSQVPAAASIQESRSLYDRVAAQGELVRKLKAEKALKAKINEAVECLLSLKAEYKEKTGKDYVPGQPPSATLEPHPASNYAPAGPETPEARALYDRVAAQGEVVRKLKAEKASTDQVDPAVQALLELKAQYKALVGVEYKPVSATGAEDRGKKKKEKENKSEKQNKPQTPDDGHGKDPAKSQGSGLAPSGAGEGQGPKKQTRLGLEARKEENLADWYSQVITKSEMIEYYDVSGCYILRPWAYSIWESIQAFFNAEIKKLGVENCYFPIFVSQSALEKEKTHIADFAPEVAWVTRSGKTELAEPIAIRPTSETVMYPTYAKWVQSHRDLPIRLNQWCNVVRWEFKHPQPFLRTREFLWQEGHSAFATFEEAAEEVLQILELYARVYEELLAIPVVKGRKTEKEKFAGGDYTTTVEAFISASGRAIQGATSHHLGQNFSKMCEIVFEDPKKPGEKQFAYQCSWGLTTRTIGVMIMVHGDNMGLVLPPRVASVQVVVIPCGITNALSEEDKEALMAKCNDYRTRLLSANIRARVDLRDNYSPGWKFNHWELKGVPIRLEVGPRDMKSCQFVAVRRDTGEKLTVAESEAEAKLEAMLEEIHANLFQRASEDLKTHMVVADTMEDLQKTLDSGKIAQIPFCGEIECEDWIKKTTARDQDLEPGAPSMGAKSLCIPFQPLRELPPGAVCVCGRSPAKFYTLFGRSY

SEQ ID NO: 112 - protein, 1512 aa, Artificial Sequence
  EPRS XP_004626936.1
MATLCLTVNAGAPPLEALLAAEHVKGDVSISVEEGKENVLRVSENVAFTEVNSILRYLARVASTAGLYGANLMEHAEIDHWLEFSATKLSSCDLFTSAINELNHCLSLRTFLVGNSLTLADFCVWATLKENAAWQEELKQSKGPVHVKRWFSFLEAQRVFQSVSAKWGVSASQARTAPEKKQDVGKFVELPGAEMGKVTVRFPPEASGYLHIGHAKAALLNQHYQVNFKGKLIMRFDDTNPEKEKEDFEKVILEDVAMLHIKPDQFTYTSDHFETIMKYAEKLIKEGKAYVDDTPAEQMKAEREQRVESRHRNNSVEKNLQMWEEMKKGSQFGQSCCLRAKIDMSSNNGCMRDPTLYRCKIQPHPRTRSRYNVYPTYDFACPIVDSIEGVTHALRTTEYHDRDEQFYWIIGALGIRKPYIWEYSRLNLNNTVLSKRKLTWFVNEGLVDGWDDPRFPTVRGVLRRGMTVEGLKQFIAAQGSSRSVVNMEWDKIWAFNKKVIDPVAPRYVALLKKDVIPVNVPEAQEEMKEVARHPKNPEVGLKPVWYSPKVLIEGADAQTLAEGETVTFINWGNINITSIHRNADGKIVSLDGKLNLENKDYKKTTKVTWLAETARALPVPTICVTYEHLITKPVLGKDEDFKQYVNRDSKREELMLGDPCLKDLKKGDIIQLQRRGFFICDQPYEPVSPYSCKEAPCVLIYIPDGHTKEMPTSGSKGKTKGETTKPEVSPPLKERAAPPVNKSCTMSEDSLALHRRVAVQGDMVRELKARKAPKEDIDAAVKQLLALKVEYKEKTGQEYKPASPPAAGAQDVSSQAPTALQEGRTLYDRVAAQGELVRRLKAEKALQAKINEAVACLLSLKAAYKEQTGKDYVPGQPPPAPNPESLPARDHEPAGPDTAEARALYDRVAAQGEVVRKLKAEKASTDQVDPAVQVLLQLKAQYKALAGVEYKPVSTTGAEDRGKKKKEKENKSEKQNKSQTPSDSQGKEPSKSQGSGVAPSGAGEGQGPKKQTRLGLEAKKEENLADWYAQVITKSEMIEYYDVSGCYILRPWAYSIWESIQAFFNAEIKKLGVENCYFPIFVSQSALEKEKTHIADFAPEVAWVTRSGKTELAEPIAIRPTSETVMYPTYAKWVQSHRDLPIRLNQWCNVVRWEFKHPQPFLRTREFLWQEGHSAFATFEEAAEEVLQILELYARVYEELLAIPVVRGKKTEKEKFAGGDYTTTVEAFISASGRAIQGGTSHHLGQNFSKMCEIIFEDPKTPGEKQFAYQCSWGLTTRTIGVMIMVHGDNMGLVLPPRVASVQVVIIPCGITNALSEEDKEALMAKCSDYRRRLLGANIRARVDLRDNYSPGWKFNHWELKGVPIRLEVGPRDMKSCQCVAVRRDTGAKLTVAESEAETKLGALLEEIHVNLFQRASEDLKTHMVVANTMEDFQKTLDSGKIAQIPFCGEIECEDWIKKTTARDQDLEPGAPSMGAKSLCIPFQPLQVLPPGAQCVCGRNPARFYTLFGRSY

SEQ ID NO: 113 - protein, 1513 aa, Artificial Sequence
  EPRS XP_004613070.1
MATLCLTVNAGDPPLGALLAVEHVKDNVSISIEEGKENILRVSENVAFTDINSILRYLARVATSAGLYGSNQLEHTEIDHWLEFSVTKLSSCDLFPSALNELNLGLSLRTYLVGNTLSLADLCVWATLKGSAAWQEELRQSKAPVHVKRWFGFLEAQQPFRSVGAKWNISPVRAKVASEKKQDVGKFIELPGAEMGKVTVRFPPEASGYLHIGHAKAALLNQHYQVNFKGKLIMRFDDTNPEKEKEDFEKVILEDVAMLHIKPDQFTYTSDHFETIMKYAEKLIQEGKAYVDDTPAEQMKAEREQRAESKHRGNSVEKNLQMWEEMKKGSPFGQSCCLRAKIDMSSNNGCMRDPTLYRCKIQPHPRTGTKYNVYPTYDFACPIVDSIEGVTHALRTTEYHDRDEQFYWIIEALGIRKPYIWEYSRLNLNNTVLSKRKLTWFVDEGLVDGWDDPRFPTVRGVLRRGMTVEGLKQFIAAQGSSRSVVNMEWDKIWAFNKKVIDPVAPRFVALLKREVVPVNIPEAREEMKEVAKHPKNPDVGLKPVWYSPRVFIEGADADTLSEGEMVTFINWGNINITKVHKSADGKIVSLDAKLNLENKDYKKTTKITWLADSTRVPPVPAVCVTYEHLITKPVLGKDEDFKQYINRNTKHEELMLGDPCLKDLRKGDIIQLQRRGFFICDQPYEPVSPYSCKEAPCVLIYIPDGHTKEMPTAGSKEKTKVEASKTETAAALKGRAAPAVSDPRAAVEDPMVLYNRVATQGDAVRELKARKATKEEIDAAVRQLLALKAEYKEKTGQEYKPGCPPAAGPPKTTAQAAPSALSAQALYEAVAAQGEAVRKLKAEKAAKAKIGEAVECLLSLKAQYKEKTGKDYVPPAQPLPPQSSGAAPAQTSQPSAPETPEAKALFNKVAAQGDVVRKLKAEKASKDQVDGAVQELLQLKAQYKALTGVEYKPVTATGPEDKDKKKKEKENKSEKQNKPQKQNDGPKKEPSKSPGSGLSSGGAGEGQGPKKQTRLGLEAKKEENLADWYSQVITKAEMIEYYDVSGCYILRPWAFSIWEAIKDFFDSEIKKLGVENCYFPMFVSQSALETEKTHVADFAPEVAWVTRSGKTELAEPIAVRPTSETVMYPAYAKWVQSHRDLPIRLNQWCNVVRWEFKHPQPFLRTREFLWQEGHSAFATFEEASEEVLQILDLYAQVYEDLLAIPVVKGRKTEKEKFAGGDYTTTVEAFISASGRAIQGATSHHLGQNFSKMFEIIFEDPKMPGEKQFAYQNSWGLTTRTIGVMTMVHGDNMGLVLPPRVACVQVVVIPCGITNALSEEDKEALIAKCNDYRRRLLGANIRVRVDLRDNYSPGWKFNHWELKGVPIRLEVGPRDMKSCQFVAVRRDTGEKLTVAEAEAETRLRALLEDIHASLFARASEDLRTHMVVSDTMEDFQKALDSGKIVQIPFCGEIDCEDWIKKTTARDQDLEPGAPSMGAKSLCIPFQPLRQLQPGARCICGKNPAKYYTLFGRSY

SEQ ID NO: 114 - protein, 1575 aa, Artificial Sequence
  EPRS KFO25396.1
MELVSGVGEEKAGAPSSGKPVAHPESTTEDATEHRLSFQFSSRLPSRPHRPEKIPSSFCPTFPYAFADFRGRMLAFRILEALLAVEHVKGDVSISVEEGKENVLRVSENVAFTEVNSILRYLARVAATAGLYGTNPMEHAEIDHWLEFSATKLSSCDLFTSAVDELNHCLSLRTFLVGNSLTLADFCVWATLKGNAAWQEASTHSRGPVHVKRWFGFLEAQRVFQSVGAKWGVAASKARGASEKKQDVGKFVELPGAEMGKVTVRFPPEASGYLHIGHAKAALLNQHYQVNFKGKLIMRFDDTNPEKEKEDFEKVILEDVAMLRIKPDQFTYTSDHFETIMKYAEKLIKEGKAFVDDTPAEQMKAEREQRVESRHRNNSVEKNLQMWEEMKQGSPFGQSCCLRAKIDMSSNNGCMRDPTLYRCKIQPHPRTGNKYNVYPTYDFACPIVDSIEGVTHALRTTEYHDRDEQFYWIIGALGIRKPYIWEYSRLNLNNTVLSKRKLTWFVHEGLVDGWDDPRFPTVRGVLRRGMTVEGLKQFIAAQGSSRSVVNMEWDKIWAFNKKVIDPVAPRYVALLKKEVVPVNIPEAQEEMKEAARHPKNPEVGLKSVWYGPRVLIEGADAETLAEGETVTFINWGNVAISRIHRNADGKIVSLDGKLNLENKDHKKTTKITWLAETARALPVPTICVTYEHLITKPVLGKDEDFKQYINRNSKREELMLGDPCLKDLKKGDIIQLQRRGFFICDQPYEPVSPYSCKEAPCILIYIPDGHTKEMPTSGSKEKTKVEATKAETSPALKERPAPSVNKSWATTEDSLVLYNRVAAQGDTVRELKARKAAKEDIDAAVKQLLALKAEYKEKTGQEYKPGSPPAAGAQDVSSQSQATAQESRSLYDRVATQGELVRKLKAEKALKAKINEAVECLLSLKAEYKEKTGKEYVPGQPPAPSSESSPAGDREPVGPEAPEARALFARAAAQGEVVRKLKAEKASKDQVEPAVQALLQLKAQYKALAGVEYKPVSATGAEDRDKKKKEKENKSEKQSKPQKPSDGHGKDSSKSPGSGLAPGGSGEGQGPRKQTRLGLEAKKEENLADWYSQVITKSEMIEYYDVSGCYILRPWAYSIWESIKAFFDAEIKKLGVENCYFPIFVSQTALEKEKTHVADFAPEVAWVTRSGKTELAEPIAIRPTSETVMYPAYAKWVQSHRDLPIRLNQWCNVVRWEFKHPQPLLRTREFLWQEGHSAFATFEEAAEEVLQILELYTRVYEDLLAIPVVKGRKTEKEKFAGGDYTTTVEAFISASGRAIQGATSHHLGQNFSKMCEIVFEDPRTPGEKQFAYQCSWGLTTRTIGVMVMVHGDNTGLVLPPRVASVQVVVIPCGVTNALCEEDRAALMAKCSEYRRRLLGADIRARVDLRDNYSPGWKFNHWELKGVPVRLEVGPRDMKSCQFVAVRRDTGEKLTVAESEAEARLQALLEDIHASLFRRASEDLKTHMVVADTMEDFQKTLDSGKIAQIPFCGEIDCEDWIKKTTARDQDLEPGAPSMGAKSLCIPFRPLRELQPGARCVCGKNPAKFYTLFGRSY

SEQ ID NO: 115 - protein, 1512 aa, Artificial Sequence
  EPRS XP_003474570.1
MATLCLTVNAGAPPLEALLTAEHVKGDVSISVEEGKENILRVSENVAFADINSILRYLARVATTAGLYGANLMEHAEIDHWLEFSATKLSSCDLFTSAIDELNHCLSLRTFLVGNSLTLADFCVWATLKGSAAWQEESKQSKGPVHVRRWFSFLEAQQAFQSVSAKWGIAANKARVAPEKKQDIGKFVELPGAEMGKVTVRFPPEASGYLHIGHAKAALLNQHYQVNFKGKLIMRFDDTNPEKEKEDFEKVILEDVAMLHIKPDQFTYTSDHFETIMKYAEKLIKEGKAYVDDTPAEQMKAEREQRVESRHRNNSVEKNLQMWEEMKKGSQFGQSCCLRAKIDMSSNNGCMRDPTLYRCKIQPHPRTGSRYNIYPTYDFACPIVDSIEGVTHALRTTEYHDRDEQFYWIIEALGIRKPYIWEYSRLNLNNTVLSKRKLTWFVNEGLVDGWDDPRFPTVRGVLRRGMTVEGLKQFIAAQGSSRSVVNMEWDKIWAFNKKVIDPVAPRYVALLKKEAVPVNIPEAQEEMKEVARHPKNPEVGLKPVWYSSRVLIEGADAQTLAEGETVTFINWGNISITSIHKNADGKIVSLDGKLNLENKDYKKTTKITWLAETTRALPTPTICVTYEHLITKPVLGKDEDFKQYVNKNSKREELMLGDPCLKDLKKGDIIQLQRRGFFICDEPYEPTSPYSCKEAPCVLIYIPDGHTKEMPTSGSKEKTKGEATKTEVKGTCLHMSLPPVNKSGASSEDPLVLHKRVAAQGDMVRELKAKKAAKEDIDAAVKQLLALKAEYKEKTGQEYKPGHPPAAGAQDVSCRSLATVQESRSLYDKVAVQGELVRKLKAEKALKAKINEAVECLLSLKAEYKAKTGKEYVPGQPPSAVSSEARPAGSCEPAGPESLEARALYDRVAAQGEAVRKLKAEEAPADQVDAAVQVLLQLKAQYKALAGVEYKPVSATGAEDRGKKKKEKENKSEKQNKPQTPNGSHGKDSSKSQGSGLAPSGAGEGQGPKKQTRLGLEAKKEENLADWYSQVITKSEMIEYYDVSGCYILRPWAYSIWESIKAFFDAEIKKLGVENCYFPIFVSQSALEKEKTHIADFAPEVAWVTRSGKTELAEPIAIRPTSETVMYPTYAKWVQSHRDLPIRLNQWCNVVRWEFKHPQPFLRTREFLWQEGHSAFATFEEAAEEVMQILELYARVYEELLAIPVVRGRKTEKEKFAGGDYTTTVEAFISASGRAIQGGTSHHLGQNFSKMCEIIFEDPKSPGEKQFAYQCSWGLTTRTIGVMVMVHGDNTGLVLPPRVAAIQVVIIPCGITNALSEEDKEALLAKCEDYRRRLLGADVRARVDLRENYSPGWKFNHWELKGVPIRLEVGPRDMKSCQFVAVRRDTGEKLTVAESEAEPRLQAMLEEIQAHLFQRALEDLKTHMVVVNTMEDFQKTLDAGKIAQIPFCGEIECEDWIKKTTARDQDLEPGAPSMGAKSLCIPFQPLQELPPGARCVCSRNPAKFYTLFGRSY

SEQ ID NO: 116 - protein, 1512 aa, Artificial Sequence
  EPRS XP_005005650.1
MATLCLTVNAGAPPLEALLTAEHVKGDVSISVEEGKENILRVSENVAFADINSILRYLARVATTAGLYGANLMEHAEIDHWLEFSATKLSSCDLFTSAIDELNHCLSLRTFLVGNSLTLADFCVWATLKGSAAWQEESKQSKGPVHVRRWFSFLEAQQAFQSVSAKWGIAANKARVAPEKKQDIGKFVELPGAEMGKVTVRFPPEASGYLHIGHAKAALLNQHYQVNFKGKLIMRFDDTNPEKEKEDFEKVILEDVAMLHIKPDQFTYTSDHFETIMKYAEKLIKEGKAYVDDTPAEQMKAEREQRVESRHRNNSVEKNLQMWEEMKKGSQFGQSCCLRAKIDMSSNNGCMRDPTLYRCKIQPHPRTGSRYNIYPTYDFACPIVDSIEGVTHALRTTEYHDRDEQFYWIIEALGIRKPYIWEYSRLNLNNTVLSKRKLTWFVNEGLVDGWDDPRFPTVRGVLRRGMTVEGLKQFIAAQGSSRSVVNMEWDKIWAFNKKLRALCKKVIDPVAPRYVALLKKEAVPVNIPEAQEEMKEVARHPKNPEVGLKPVWYSSRVLIEGADAQTLAEGETVTFINWGNISITSIHKNADGKIVSLDGKLNLENKDYKKTTKITWLAETTRALPTPTICVTYEHLITKPVLGKDEDFKQYVNKNSKREELMLGDPCLKDLKKGDIIQLQRRGFFICDEPYEPTSPYSCKEAPCVLIYIPDGHTKEMPTSGSKEKTKGEATKTEMSLPPVNKSGASSEDPLVLHKRVAAQGDMVRELKAKKAAKEDIDAAVKQLLALKAEYKEKTGQEYKPGHPPAAGAQDVSCRSLATVQESRSLYDKVAVQGELVRKLKAEKALKAKINEAVECLLSLKAEYKAKTGKEYVPGQPPSAVSSEARPAGSCEPAGPESLEARALYDRVAAQGEAVRKLKAEEAPADQVDAAVQVLLQLKAQYKALAGVEYKPVSATGAEDRGKKKKEKENKSEKQNKPQTPNGSHGKDSSKSQGSGLAPSGAGEGQGPKKQTRLGLEAKKEENLADWYSQVITKSEMIEYYDVSGCYILRPWAYSIWESIKAFFDAEIKKLGVENCYFPIFVSQSALEKEKTHIADFAPEVAWVTRSGKTELAEPIAIRPTSETVMYPTYAKWVQSHRDLPIRLNQWCNVVRWEFKHPQPFLRTREFLWQEGHSAFATFEEAAEEVMQILELYARVYEELLAIPVVRGRKTEKEKFAGGDYTTTVEAFISASGRAIQGGTSHHLGQNFSKMCEIIFEDPKSPGEKQFAYQCSWGLTTRTIGVMVMVHGDNTGLVLPPRVAAIQVVIIPCGITNALSEEDKEALLAKCEDYRRRLLGADVRARVDLRENYSPGWKFNHWELKGVPIRLEVGPRDMKSCQFVAVRRDTGEKLTVAESEAEPRLQAMLEEIQAHLFQRALEDLKTHMVVVNTMEDFQKTLDAGKIAQIPFCGEIECEDWIKKTTARDQDLEPGAPSMGAKSLCIPFQPLQELPPGARCVCSRNPAKFYTLFGRSY

SEQ ID NO: 117 - protein, 1511 aa, Artificial Sequence
  EPRS XP_004867452.1
MATLCLTVNAGAPPLEALLAAEHVKEDVSISVEGGKENVLRVSENVAFTDVYSILRYLARVAATAGLYGANVMEHAEIDHWLEFSATKLASCASFASAVNELNHCLSLRTFLVGNSLTLADFCVWAALKGNAAWQEEATQSKGPVHVKRWFSFLEAQRVFQSVSAKWGVPASKTQAASEKKQDVGKFVELPGAEMGKVTVRFPPEASGYLHIGHAKAALLNQHYQVNFKGKLIMRFDDTNPEKEKEDFEKVILEDVAMLHIKPDQFTYTSDHFETIMKYAEKLIKEGKAYVDDTPAEQMKAEREQRVESRHRSNSVEKNLQMWEEMKKGSQFGQSCCLRAKIDMSSNNGCMRDPTLYRCKIQPHPRTGSRYNVYPTYDFACPIVDSIEGVTHALRTTEYHDRDEQFYWVIEALGIRKPYIWEYSRLNLNNTVLSKRKLTWFVHEGLVDGWDDPRFPTVRGVLRRGMTVEGLKQFIAAQGSSRSVVNMEWDKIWAFNKKVIDPVAPRYVALLKKEVVPVLVPEVQEEMKEAARHPKNPEVGLKPVWYSPRVLIEGADAETLTEGETVTFINWGNISITKIHRNADGKIVSLDGKLNLENKDYKKTTKITWLAETAQALPVPTICVTYEHLITKPVLGKDEDFKQYINKNSKREELMLGDPCLKDLKKGDIIQLQRRGFFICDQPYEPVSPYSCKEAPCILIYIPDGHTKEMPTSGSKEKTKGEATKTEMSPSLKERPAPPVYKSWAPSEDFLVLYNRVATQGDTVRELKARKAAKEDIDAAVKQLLALKAEYKEMTGQEYKPGSPPAAGAQEAASQSPAAALESRSLYDRVAAQGELVRKLKAEKALKAKINQAVECLLSLKAEYKEKTGKEYVPGQPPAPSSKSSPAGDRESSGPEAPEAQVLFARVAAQGEVVRKLKAEKASKDQVDPAVQVLLQLKAQYKALAGVEYKPVSATGADDRDKKKKDKENKSEKQNKPQKAHDGHGKEPFNSQGSGPTPGGAGEGQGPRKQTRLGLEAKKEENLADWYSQVITKSEMIEYYDVSGCYILRPWAYSIWESIKAFFDAEIKKLGVENCYFPIFVSQSALEKEKTHVADFAPEVAWVTRSGKTELAEPIAIRPTSETVMYPAYAKWVQSHRDLPIRLNQWCNVVRWEFKHPQPFLRTREFLWQEGHSAFATFEEAAEEVLQILELYTRVYEELLAIPVVKGRKTEKEKFAGGDYTTTVEAFISASGRAIQGATSHHLGQNFSKMCEIVFEDPKTPGEKQFAYQCSWGLTTRTIGVMVMVHGDNTGLVLPPRVASVQVVVIPCGITNALSEGDREALMVKCSDYCRRLLGADIRTRVDLRDNYSPGWKFNHWELKGVPIRLEVGPRDMKSCQFVAVRRDTGEKLTIAESEAEAKLEALLEDIHASLFRRASEDLKTHMVVADTMEDFQKTLDAGKVAQIPFCGEIDCEDWIKKTTTRDQDLEPGAPSMGAKSLCIPFRPLQELQPGARCVCGKNPAKFYTLFGRSY

SEQ ID NO: 118 - protein, 1511 aa, Artificial Sequence
  EPRS XP_004878984.1
MATLCLTVTGGAPPREALLAAEHVKEDVSISVEGGKENVLRVSENVAFTDVYSILRYLARVAATAGLYGANVMEHAEIDHWLEFSATKLASCASFASAVNELNHCLSLRTFLVGNSLTLADFCVWAALKGNAAWQEEATQSKGPVHVKRWFSFLEAQRVFQSVSAKWGVPASKTQAASEKKQDVGKFVELPGAEMGKVTVRFPPEASGYLHIGHAKAALLNQHYQVNFKGKLIMRFDDTNPEKEKEDFEKVILEDVAMLHIKPDQFTYTSDHFETIMKYAEKLIKEGKAYVDDTPAEQMKAEREQRVESRHRSNSVEKNLQMWEEMKKGSQFGQSCCLRAKIDMSSNNGCMRDPTLYRCKIQPHPRTGSRYNVYPTYDFACPIVDSIEGVTHALRTTEYHDRDEQFYWVIEALGIRKPYIWEYSRLNLNNTVLSKRKLTWFVHEGLVDGWDDPRFPTVRGVLRRGMTVEGLKQFIAAQGSSRSVVNMEWDKIWAFNKKVIDPVAPRYVALLKKEVVPVLVPEVQEEMKEAARHPKNPEVGLKPVWYSPRVLIEGADAETLTEGETVTFINWGNISITKIHRNADGKIVSLDGKLNLENKDYKKTTKITWLAETAQALPVPTICVTYEHLITKPVLGKDEDFKQYINKNSKREELMLGDPCLKDLKKGDIIQLQRRGFFICDQPYEPVSPYSCKEAPCILIYIPDGHTKEMPTSGSKEKTKGEATKTEMSPSLKERPAPPVYKSWAPSEDFLVLYNRVATQGDTVRELKARKAAKEDIDAAVKQLLALKAEYKEMTGQEYKPGSPPAAGAQEAASQSPAAALESRSLYDRVAAQGELVRKLKAEKALKAKINQAVECLLSLKAEYKEKTGKEYVPGQPPAPSSKSSPAGDRESSGPEAPEAQVLFARVAAQGEVVRKLKAEKASKDQVDPAVQVLLQLKAQYKALAGVEYKPVSATGADDRDKKKKDKENKSEKQNKPQKAHDGHGKEPFNSQGSGPTPGGAGEGQGPRKQTRLGLEAKKEENLADWYSQVITKSEMIEYYDVSGCYILRPWAYSIWESIKAFFDAEIKKLGVENCYFPIFVSQSALEKEKTHVADFAPEVAWVTRSGKTELAEPIAIRPTSETVMYPAYAKWVQSHRDLPIRLNQWCNVVRWEFKHPQPFLRTREFLWQEGHSAFATFEEAAEEVLQILELYTRVYEELLAIPVVKGRKTEKEKFAGGDYTTTVEAFISASGRAIQGATSHHLGQNFSKMCEIVFEDPKTPGEKQFAYQCSWGLTTRTIGVMVMVHGDNTGLVLPPRVASVQVVVIPCGITNALSEGDREALMVKCSDYCRRLLGADIRTRVDLRDNYSPGWKFNHWELKGVPIRLEVGPRDMKSCQFVAVRRDTGEKLTIAESEAEAKLEALLEDIHASLFRRASEDLKTHMVVADTMEDFQKTLDAGKVAQIPFCGEIDCEDWIKKTTTRDQDLEPGAPSMGAKSLCIPFRPLQELQPGARCVCGKNPAKFYTLFGRSY

SEQ ID NO: 119 - protein, 1616 aa, Artificial Sequence
  EPRS EPQ16188.1
MSAETHVRVTLQQVFHRTCALLAVEHVKDNVSIFVEEGKENILRVSENVVFTDINSILRYLARVAMTAKLYGSNLMEHTEIDHWLEFSATKLSSCNLFPSAINELNHCLSLRTYLVGNSLSLADLCVWATLKGNVAWQEQLQQNRAPVHVKRWFGFLEAQQAFQSVGTKWNVSATKAKGAPQKKPDVGKFVELPGAEMGKVTVRFPPEASGYLHIGHAKAALLNQHYQVNFKGKLIMRFDDTNPEKEKEDFEKVILEDVAMLHIEPDQFTYTSDHFETIMKYAEKLIQEGKAYVDDTPAERMKAEREQRTESKHRNNSVEKNLQMWEEMKKGSPFGQSCCLRAKIDMNSNNGCMRDPTLYRCKIQPHPRTGNRYNVYPTYDFACPIVDSIEGVTHALRTTEYHDRDEQFYWIIEALGIRKPYIWEYSRLNLNNTVLSKRKLTWFVDEGLVDGWDDPRFPTVRGVLRRGMTVEGLKQFIAAQGSSRSVVNMEWDKIWAFNKKVIDPVAPRYVALLKKEVIPVHVPGAQEEMKEVAKHPKNPDVGLKPVWYSPRVFIEGADAETLSEGEMVTFINWGNINITKIHKNANGKIVSLDAKLNLENKDYKKTTKITWLAETAHALPIPAICVTYEHLITKPVLGKDEDFKQYVNKNSKHEELMLGDPCLKDLKKGDIIQLQRRGFFICDQPYEPVSPHSCREAPCVLIFIPDGHTKEMPTSGSKEKTKVETVKNETTTPVKERPVAPLTNTSAASEGPMVLYNKVAAQGDVVRELKAKKAAKEDVDAAVKHLLALKAEYKEKTGQEYKPGSPPAAAAAQAVSSPSSASPPGGRSLYDEVAAQGEVVRKLKAEKAPKAVSSPASASPPGGRSLYDEVAAQGEVVRKLKAEKAPKAKVNEAVECLLSLKAQYKEKTGQEYVPGQPPLPLGSGSSPARSSEPCGPETAEAKVLFDQVASQGEVVRKLKAEKASKDQVDAAVQELLQRKAQYKSLTGVEYKPVSATGAEDKDKKKKEKENKSEKQNKPQKQNDGSKKEPSRGQGGGGLPPSGAGEGQGPRKQTRLGLEAKKEENLADWYSQVITKSEMIEYYDVSGCYILRPWAFSIWESIKDFFDAEIKKLGVENCYFPMFVSQSALEKEKTHVADFAPEVAWVTRSGKTELAEPIAVRPTSETVMYPAYAKWVQSHRDLPIRLNQWCNVVVVMYPAYAKWVQSHRDLPIRLNQWCNVVRWEFKHPQPFLRTREFLWQEGHSAFATFEEAAAERWEFKHPQPFLRTREFLWQEGHSAFATFEEAAAEVLQILDLYAQVYEELLAIPVVKGRKTEKEKFAGGDYTTTVEAFISASGRAIQGATSHHLGQNFSKMFEIIFEDPKMPGEKQFAYQNSWGLTTRTIGVMTMVHGDNMGLVLPPRVACVQVVVIPCGITTALSEEDRDALIAKCNDYRRRLLSVNIRARADLRDNYSPGWKFNHWELKGVPIRLEVGPRDMKSCQFVAVRRDTGEKLTVTENEAETKLQALLEDIHANLFRKASEDLKTHMVVANSMEDFQKLLDSGKIVQIPFCGEIDCEDWIKKTTARDQDLEPGAPSMGAKSLCIPFKPLCELQPGARCVCGKNPAKYYTLFGRSY

SEQ ID NO: 120 - protein, 1486 aa, Artificial Sequence
  EPRS NP_001019409.1
MAALCLTVNAGNPPLGCRVKVNKRNKSFMLSFLEALLAVEHVKGDVSISVEEGKENLLRVSESVVFTDTNSILRYLARVAATSGLYGSNLMEHTEIDHWLEFSATKLSSCDVLTSAIKELNHCLSLRTYLVGNSLTLADLCVWATLKGNAACQEHLRQSKTLVHVNRWYGFLEAQQAFRSVGTKWDASANKATGAPDRKQDIGKFVELPGAEMGKVTVRFPPEASGYLHIGHAKAALLNQHYQVNFKGKLIMRFDDTNPEKEKEDFEKVILEDVAMLHIKPDQFTYTSDHFETIMKYAEKLIEEGKAYVDDTPADEMKAEPVEKNLQMWEEMKRGSQFGQSCCLRAKIDMSSNNGCMRDPTLYRCKIQPHPRTGNKYNVYPTYDFACPIVDSIEGVTHALRTTEYHDRDEQFYWIIEALGIRKPYIWEYSRLNLNNTVLSKRKLTWFVNEGLGSSRSVVNMEWDKIWAFNKKVIDPVAPRYVALLKKEVIPVNILDAQEEMKEVARHPKNPDVGLKPVWYSPKVFIEGADAETFSEGEMVTFINWGNINITKIHKNPDGKITSLDAKLNLENKDYKKTTKITWLAETTQALPVPAVCVTYEHLITKPVLGKDEDFKQYVNKDSKHEELMLGDPCLKDLKKGDIIQLQRRGFFICDQPYEPVSPYSCKEAPCILIYIPDGHTKEMPTSGSKEKTKVEISKKETGSAPKERPAAAVSAPCAAAEDAAILYSRVAVQGDAVRDLKAKKAPKEDIDAAVKQLLTLKAEYKEKTGQEYRPGNPPTAAVQTVSTKSPSNTGEYTSLYNKVAAQGELVRKLKAEKAPKAKINDAVECLLSLKAEYKEKTGKEYVPGQLPASQNSHSSPVSNAKPVGSETPEAKLLFDRVACQGEVVRKLKAEKASKDQVDSAVQELLQLKAQYKSLTGIEYKPVSATGAEDKDKKKKEKENKSEKQNKPQKQNDGQGKDSSKSQGSGLSSGGAGEGQGPKKQTRLGLEAKKEENLAEWYSQVITKSEMIEYYDVSGCYILRPWSYSIWESIKDFFDAEIKKLGVENCYFPIFVSQGALEKEKNHIADFAPEVAWVTRSGKTELAEPIAIRPTSETVMYPAYAKWVQSHRDLPIRLNQWCNVVRWEFKHPQPFLRTREFLWQEGHSAFATFEEAADEVLQILELYARVYEELLAIPVVRGRKTEKEKFAGGDYTTTLEAFISASGRAIQGATSHHLGQNFSKMCEIVFEDPKTPGEKQFAYQCSWGLTTRTIGVMIMVHGDNMGLVLPPRVASVQVVVIPCGITNTLSEEDREALMAKCNEYRRRLLGADIRARVDLRDNYSPGWKFNHWELKGVPVRLEVGPRDMKSCQFVAVRRDTGEKLTIAEKEAESKLKGVLEDIQLNLFTRASEDLKSHMVVSDTLEDFQKVLDSGKVAQIPFCGEIDCEDWIKKTTARDQDVEPGAPSMGAKSLCIPFNPLCELQPGAMCVCGKNPAKFYTLFGRSY

SEQ ID NO: 121 - protein, 1519 aa, Artificial Sequence
  EPRS XP_008177290.1
  misc_feature (891): Xaa is any amino acid
MALSLTVNSEVPPLGALLTVEHVKNDVKISVEEGKETILRVSDHAVFTDVNSIVRYLARVATSAGLYGSNLLEHTEIDHWLEFSATKLSTGAQFGSALLELNHCLSLRTYLVGNSLSLADLCVWAVLKGSSAWQEQLQQNKAPVHMKRWYGFLEAQCAFQSVGTKWAATASKTKVATEKKQDVGKFVELPGAEMGKVIVRFPPEASGYLHIGHAKAALLNQHYQVNFKGKLIMRFDDTNPEKEKEDFEKVILEDVAMLHIKPDQFTYTSDHFETIMKYAEKLIQEGKAYVDDTPAEQMKMEREQRIESKHRNNSVEKNLQMWEEMKKGTECGQMCCLRAKIDMNSNNGCMRDPTLYRCKNQPHPRTASNYNVYPTYDFACPIVDSIEGVTHALRTTEYHDRDEQFYWIIEALGIRKPYIWEYSRLNLNNTVLSKRKLTWFVNEGLVDGWDDPRFPTVRGVLRRGMTVEGLKQFIAAQGSSRSVVNMEWDKIWSFNKKVIDPVAPRYTALLKDEVVTVNVPEALDEMKEVAKHPKNADVGLKPVWYSSKVLIDGADAETLTEGETVTFINWGNIIITKIHRNSSRKIVSIDAKLNMENKDYKKTTKITWLAETPHAPLIPAVCVNYDHLITKPVLGKDEDFKQYVNRNSKQEELMLGDPCLKELKKGDIIQLQRRGFFICDQPYEPVSPYSCKEAPCVLIYIPDGHTKEMPTSGSKEKTKAETAKKEASSTSKGKSVPLVADTCIPASAPSEDPLVFYNRVSAQGDVVRDLKGKKAAKEDIDTAVKQLLALKVEYKEKTGQEYKPGNPPAAAVAVPNVSSTPQTSSNLDSKALYHKVAEQGEVVRKLKAEKASKDKVDEAVKLLLSLKAEYKEKTGQDYKPGHVPATQISTXPQTTSTEINGPDTPEAKALFNKVACQGEEVRKLKAGKAEKDKIDTAVQELLQLKAQYKSLAGVDYKPVSATGVEDKDKKKKEKENKSEKQNKQQKQSDTQKKEYQKDQGGNGLSSDGSGEGQGPKKQTRLGLEAKKEENLSDWFSQVITKSEMIEYYDVSGCYILRPWTFFIWETIKDFFDGEIKKLGVENCYFPMFVSQAALEKEKTHIADFAPEVAWVTRSGKTELAEPIAVRPTSETVMYPAFAKWVQSHRDLPIKLNQWCNVVRWEFKHPQPFLRTREFLWQEGHTAFATYEDAAEEVLQILDLYARVYEELLAIPIVKGRKTEKEKFAGGDYTTTVEAYVSASGRAIQGATSHHLGQNFSKMFEIVFEDPKIPGEKQFAYQNSWGISTRTIGVMTLIHGDNMGLVLPPRVACVQVVIIPCGITNSLSDEDKEALMKKCNEYLKRLLRVNVRVRADLRDNYSPGWKFNHWELKGVPIRLEVGPRDMKNGQFVAVRRDTGQKMTFAEHEAEDKLRHILEEIHANLYNRAFEDLTNHMVVANTMEDFQKELEAGKIVQIPFCGEMECEDWIKKTTARDQDLEPGAPSMGAKSLCIPFKPLRELQRGAKCVCGKNPAKFYTLFGRSY

SEQ ID NO: 122 - protein, 1519 aa, Artificial Sequence
  EPRS XP_009094640.1
MAALSLTVDAGSPPLGALLTVEHVKNDVEISVQEGKETILSVSEQVSFTDVNSIARYLARVAASAGLYGSNLLEHTEIDHWLEFSATKLSTASQFPSAIQELNHCLSLRTYLVGNSLSLADLCVWAVLKDSSTWQGQLEQNKAPVHAKRWYSFLEVQRAFQSVGAKWAAGTPKVKMATEKEKKADVGKFVELPGAEMGKVIVRFPPEASGYLHIGHAKAALLNQHYQVNFKGKLIMRFDDTNPEKEKEDFEKVILEDVAMLHIKPDQFTYTSDHFETIMKYAEKLIQEGKAYVDDTPAEQMKAEREQRVESKHRNNCVNKNLQMWEEMKKGTEYGQTCCLRAKIDMSSNNGCMRDPTLYRCKNQPHPRTGSTYNVYPTYDFACPIVDSIEGVTHALRTTEYHDRDEQFYWIIEALGIRKPYIWEYSRLNLNNTVLSKRKLTWFVNEGLVDGWDDPRFPTVRGVLRRGMTVEGLKQFIAAQGSSRSVVNMEWDKIWSFNKKVIDPVAPRYTALLKDAVVPVNIPEAQEEMKEVAKHPKNADVGLKPVWYSSKVLIEGADAETLAEGEVVTFINWGNIIITKLNRNSSGKIVSINAKLNLDNKDFKKTTKITWLAETPRAPLIPTVCVNYEHLITKPVLGKDEDFKQYINRNSKQEELMLGDPCLKELKKGDIIQLQRRGFFICDQPYEPVSPYSCKDAPCILIYIPDGHTKEMPTSGSKEKTKAETAKKEASSAVKEKSAPVVGRTSTPACAESSEGLLIIYKKVAAQGDVVRDLKAKKAAKEDIDKAVKQLLALKAEYKEKTGQEYKPGNPPVSGTAQSSKLETSGTLESKALYDKVAEQGEVVRKLKAEKASKDQIDEAVKLLLSLKADYKEKTGQEYKPGHPPAAQGALPQTTNTVPSGPDTPEAKALFGKVALQGDEVRKLKAEKADKEKIDVAVKELLQLKAQYKSVAGVDYKPVSASGVDDKDKKKKEKENKSEKQSKQQKQNDGPKKEPLQGQSGNERSSNGSGEGQGPKKQTRLGLEVKKEENLSEWFSQVITKSEMIEYYDVSGCYILRPWAHAIWEAIKDFFDAEIKKLGVENCYFPMFVSQAALETEKSHIADFAPEVAWVTRSGKTDLAEPIAIRPTSETVMYPSYAKWVQSHRDLPIKLNQWCSVVRWEFKHPQPFLRTREFLWQEGHTAFATYEEAAEEVLQILDLYARVYEDLLAIPVVKGRKTEKEKFAGGDYTTTLEAFISASGRAIQGATSHHLGQNFSKMFEIVFEDPKKPGEKQFAYQNSWGITTRTIGVMTMIHGDNMGLVLPPRVACIQVVIIPCGITNSLSEEDREALLKKCNEYRSRLLAVNIRVRADLRDNYSPGWKFNHWELKGVPVRVEVGPRDMKSQQFVAVRRDTGQKLTLSEHEAEEKLKQILEEIQANLYSRASEDLKSHMVVASNMEDFQKELDSGKIVQIPFCGEIECEDWIKKTTARDQDLEPGAPSMGAKSLCIPFQPLRELQPGARCVCGKNPAKFYTLFGRSY

SEQ ID NO: 123 - protein, 1516 aa, Artificial Sequence
  EPRS XP_006022406.1
MALSLTVNVGNPPLGALLTVEHVKNDFEILVEEGKETVLRISDHVTFTDANSIARYLARVATSAGLYGSNLLEHTEIDHWLEFSATKLSAPSQFPSAIHELNHCLSLRTYLVGNSLSLADLCVWAVLKGSNIWQEELQQNKAPVHVKRWYDFLEAQCAFQSVGTKWAAATPKTNVATEKKQDVGKFVELPGAEVGKVIVRFPPEASGYLHIGHAKAALLNQHYQVNFKGKLIMRFDDTNPEKEKEDFEKVILEDVAMLHIKPDQFTYTSDHFETIMKYAEKLIQEGKAYVDNTPAEQMKMEREQRKESKHRNNSVEKNLEMWEEMKKGTEYGQTCCLRAKIDMSCNNGCMRDPTLYRCKNQPHPRTGNTYKVYPTYDFACPIVDSIEGVTHALRTTEYHDRDEQFYWIIEALGIRKPYIWEYSRLNLNNTVLSKRKLTWFVNEGLVDGWDDPRFPTVRGVLRRGMTVEGLKQFIAAQGSSRSVVNMEWDKIWAFNKKVIDPVAPRYTALLKDDVVTVNIPEAVEEMKEVAKHPKNPDVGLKPVWYGSRVLIEGADADTLTEGEMVTFINWGNIIITKIHRNSNRKIVSIDAKLNLENKDYKKTAKITWLTNTPSAPLIPSVCVNYEHLITKPVLGKDEDFKQYVNRNSKQEELMLGDPCLKELKKGDIIQLQRRGFFICDQPYEPISPYSCKEAPCILIYIPDGHTKEMPTSGSKEKTKAETAKKEASSASKEKPTPPFVADTSTAPADPVVLYNRVSAQGDVVRDLKAKKASKEDIDAAVKQLLALKAEYREKTGQEYKPGSHPAAAASVPSVPSNLETSSMLDSTTLYDKVAEQGDMVRKLKAERAPKDKVDEAVRLLLSLKAEYKEKTGQDYKPGHPPAAQTSASPQATSIETSGSDTPEAKALYDKVALQGEVVRKLKAEKAEKDKIDAAVQELLQLKAQYKSFAGVDYKPASMTGIEDKDKKKKEKENKSEKQNKQQKQNETPKKESPKEQCANDLSSNGAGEGQGPKKQTRLGLEAKKEENLADWFSQVITKSEMIEYYDVSGCYVLRPWAYAIWEAIRDFFDTEIKKLGVENCYFPMFVSQAALEKEKTHIADFAPEVAWVTRSGKTELAEPIAVRPTSETVMYPAYAKWVQSHRDLPIKLNQWCNVVRWEFKHPQPFLRTREFLWQEGHTAFATYEEAAEEVLQILDLYARVYEEFLAIPVVKGRKTEKEKFAGGDYTTTVEAYISASGRAIQGATSHHLGQNFSKMFEIVFEDPKKPGEKQLAYQNSWGITTRTIGVMTMIHGDNMGLVLPPRVACVQVIIIPCGITNSLSEEDKDALLKKCNDYLKRLLSVNIRVRADLRDNYSPGWKFNHWELKGVPIRLEVGPRDMKNHQFVAVRRDTGQKLTFAEDETEDKLSQILEEIHANLYNRAFEDLKNHMVVSNDMDDFQKELDSGKIVQIPFCGEIECEDWIKKTTARDQDLEPGAPSMGAKSLCIPFKPLCELQAGTKCVCGKNPAKFYTLFGRSY

SEQ ID NO: 124 - protein, 264 aa, Artificial Sequence
  Snail1 AAD17332.1
MPRSFLVRKPSDPNRKPNYSELQDSNPEFTFQQPYDQAHLLAAIPPPEILNPTASLPMLIWDSVLAPQAQPIAWASLRLQESPRVAELTSLSDEDSGKGSQPPSPPSPAPSSFSSTSASSLEAEAYAAFPGLGQVPKQLAQLSEAKDLQARKAFNCKYCNKEYLSLGALKMHIRSHTLPCVCGTCGKAFSRPWLLQGHVRTHTGEKPFSCPHCSRAFADRSNLRAHLQTHSDVKKYQCQACARTFSRMSLLHKHQESGCSGCPR

SEQ ID NO: 125 - protein, 264 aa, Artificial Sequence [sequence omitted]

SEQ ID NO: 126 - protein, 264 aa, Artificial Sequence
  Snail1 XP_004062397.1
MPRSFLVRKPSDPNRKPNYSELQDSNPEFTFQQPYDQAHLLAAIPPPEILNPTASLPMLIWDSVLAPQAQPIAWASLRPQESPRAAELTSLSDEDSGKGSQPPSPPSPAPSSFSSTSASSLEAEAYAAFPGLGQVPKQLAQLSEAKDLQARKAFNCKYCNKEYLSLGALKMHIRSHTLPCVCGTCGKAFSRPWLLQGHVRTHTGEKPFSCPHCSRAFADRSNLRAHLQTHSDVKKYQCQACARTFSRMSLLHKHQESGCSGCPR

SEQ ID NO: 127 - protein, 172 aa, Artificial Sequence
  Snail1 AAF32527.1
MPRSFLVRKPSDPNRKPNYSELQDSNPEFTFQQPYDQAHLLAAIPPPEILNPTASLPMLIWDSVLAPQAQPIAWASLRLQESPRVAELTSLSDEDSGKGSQPPSPPSPAPSSFSSTSVSSLEAEAYAAFPGLGQVPKQLAQLSEAKDLQARKASNCKYCNKEYLSLGALKMH

SEQ ID NO: 128 - protein, 264 aa, Artificial Sequence
  Snail1 XP_003809303.1
MPRSFLVRKPSDPNRKPNYSELQDSNPEFTFQQPYDQAHLLAAIPPPEILNPTASLPMLIWDSVLAPQAQPIAWASLRPQESPRAAELTSLSDEDSGKGSQPPSPPSPAPSSFSSTSASSLEAEAYAAFPGLGQVPKQLAQLSDAKDLQARKAFNCKYCNKEYLSLGALKMHIRSHTLPCVCGTCGKAFSRPWLLQGHVRTHTGEKPFSCPHCSRAFADRSNLRAHLQTHSDVKKYQCQACARTFSRMSLLHKHQESGCSGCPR

SEQ ID NO: 129 - protein, 264 aa, Artificial Sequence
  Snail1 XP_003252972.1
MPRSFLVRKPSDPNRKPNYSKLQDSNPEFTFQQPYDQAHLLAAIPPPEILNPTASLPMLIWDSVLAPQAQPIAWASLRPQESPRAAELTSLSDEDSGKGSQPPSPPSPAPSSFSSTSASSLEAEAYAAFPGLGQVPKQLAQLSEAKDLQSRKAFNCKYCNKEYLSLGALKMHIRSHTLPCVCGTCGKAFSRPWLLQGHVRTHTGEKPFSCPHCSRAFADRSNLRAHLQTHSDVKKYQCQACARTFSRMSLLHKHQESGCSGCPR

SEQ ID NO: 130 - protein, 264 aa, Artificial Sequence
  Snail1 XP_010382148.1
MPRSFLVRKPSDPNRKPNYSELQDSNPEFTFQQPYDQAHLLAAIPPPEILNPTASLPMLIWDSVLAPQAQPIAWASLRPQESPRVAELTSLSDEDSGKGSQPPSPPSPATSSFSSTSASSLETEAYAAFPGLGQVPKQLAQLSEAKDLQSRKAFNCKYCNKEYLSLGALKMHIRSHTLPCVCGTCGKAFSRPWLLQGHVRTHTGEKPFSCPHCSRAFADRSNLRAHLQTHSDVKKYQCQACARTFSRMSLLHKHQESGCSGCPR

SEQ ID NO: 131 - protein, 264 aa, Artificial Sequence
  Snail1 XP_001097698.1
MPRSFLVRKPSDPNRKPNYSELQDSNPEFTFQQPYDQAHLLAAIPPPEILNPTASLPMLIWDSVLAPQAQPIAWASLRPQESPRAAELTSLSDEDSGKGSQPPSPPSPATSSFSSTSASSLEAEAYAAFPGLGQVPKQLAQLSEAKDLQSRKAFNCKYCNKEYLSLGALKMHIRSHTLPCVCGTCGKAFSRPWLLQGHVRTHTGEKPFSCPHCSRAFADRSNLRAHLQTHSDVKKYQCQACARTFSRMSLLHKHQESGCSGCPR

SEQ ID NO: 132 - protein, 264 aa, Artificial Sequence
  Snail1 XP_002830458.1
  misc_feature (196): Xaa is any amino acid
MPRSFLVRKSSDPNRKPNYSELQDSNPEFTFQQPYDQAHLLAAIPPPEILNPTASLPMLIWDSVLAPQAQPIAWASLRPQESPRAAELTSLSDEDSGKGSQPPSPPSPAPSSFSSTSASSLEAEAYAAFPGLGQVPKQLAQLSEAKDLQSRKAFNCKYCNKEYLSLGALKMHIRSHTLPCVCGTCGKAFSRPWLLXGHVRTHTGEKPFSCPHCSRAFADRSNLRAHLQTHSDVKKYQCQACARTFSRMSLLHKHQESGCSGCPR

SEQ ID NO: 133 - protein, 264 aa, Artificial Sequence
  Snail1 XP_009435687.1
MPRSFLVRKPSDPNRKPNYRGLQDSNPEFTFQQPYDQAHLLAAIPPPEILNPTASLPMLIWDSVLAPQAQPIAWASLRPQESPRAAELTSLSDEDSGKGSQPPSPPSPAPSSFSSTSASSLEAEAYAAFPGLGQVPKQLAQLSDAKDLQARKAFNCKYCNKEYLSLGALKMHIRSHTLPCVCGTCGKAFSRPWLLQGHVRTHTGEKPFSCPHCSRAFADRSNLRAHLQTHSDVKKYQCQACARTFSRMSLLHKHQESGCSGCPR

SEQ ID NO: 134 - protein, 265 aa, Artificial Sequence
  Snail1 XP_003932616.1
MPRSFLVRKPSDPNRKPNYSELQDSNPEFTFQQPYDQAHLLAAIPPPEILNPTASLPTLIWDSVLAPQAQPIAWASLRRPQESPRAAELTSLSDEDSGKGSQPPSPPSPASSSFSSTSASSLEAEAYATFPGLVQVPKQLAQLSEAKDLQSRKAFNCKYCNKEYLSLGALKMHIRSHTLPCVCGTCGKAFSRPWLLQGHVRTHTGEKPFSCPHCSRAFADRSNLRAHLQTHSDVKKYQCQACARTFSRMSLLHKHQESGCSGCPR

SEQ ID NO: 135 - protein, 264 aa, Artificial Sequence
  Snail1 XP_003787739.1
MPRSFLVRKPSDPRRKPNYSELQDSNPEFTFQQPYDQAHLLAAIPPPEILNPTASLPMLIWDSLLAPQVQPIGWASFRPQESPKVAELTSLSDEDSGKGSQPPSPPSPAPSSFSSTSASSLEAEAYATFPGLGQVPKQLVQLSEAKDPQSRKAFNCKYCNKEYLSLGALKMHIRSHTLPCVCATCGKAFSRPWLLQGHVRTHTGEKPFSCPHCSRAFADRSNLRAHLQTHSDVKKYQCQACARTFSRMSLLHKHQESGCSGGPR

SEQ ID NO: 136 - protein, 264 aa, Artificial Sequence
  Snail1 XP_008060134.1
MPRSFLVRKPSDPRRKPNYSELQDSNLEFTFQQPYDQAHLLAAIPPPEILNPTASLPTLIWDSLLAPQAQPIAWAALRPQESTKVAELTSLSDEDSGKGSQPPSPPSPAPSSFSSTSASSLEAEAYAAFPGLGQVPPRLARLSEAKDPQSRKAFNCKYCDKEYLSLGALKMHIRSHTLPCVCATCGKAFSRPWLLQGHVRTHTGEKPFSCPHCSRAFADRSNLRAHLQTHSDVKKYQCPACSRTFSRMSLLHKHQESGCSGGPR

SEQ ID NO: 137 - protein, 264 aa, Artificial Sequence
  Snail1 XP_008570069.1
MPRSFLVRKSSGSRRKPNYSELQDSSLEFTFQQPYDQAHLLAAIPPPEVLNPTASLPTLIWDSLLVPQAQPIGWASLRPQESPKVAELTSLSDEDSGKGSQPPSPASPAPSSFSSTSASSLEAEAYAAFPGLGQVPKQLAQLSEAKDPQSRKAFNCKYCNKEYLSLGALKMHIRSHTLPCVCGTCGKAFSRPWLLQGHVRTHTGEKPFSCPHCSRAFADRSNLRAHLQTHSDVKKYQCQTCSRTFSRMSLLHKHQESGCSGGPR

SEQ ID NO: 138 - protein, 264 aa, Artificial Sequence
  Snail1 XP_004883645.1
MPRSFLVRKPSDPNRKPNYSELQDSSPEFTFQQPYDQAHLLAAIPPPEVLNPTASLPTLIWDSVLAPLAQPLGWASLQPQESPRAAELTSLSDEDSGKGSQPPSPPSPAPSSFSSTSTSSLEAEAYAAFPGLGQLPKQLARLSVAKDLQSRKAFNCKYCNKEYLSLGALKMHIRSHTLPCVCATCGKAFSRPWLLQGHVRTHTGEKPFSCSHCSRAFADRSNLRAHLQTHSDVKKYQCKMCSRTFSRMSLLHKHQESGCLGGPR

SEQ ID NO: 139 - protein, 263 aa, Artificial Sequence
  Snail1 XP_003732892.1
  misc_feature (11): Xaa is any amino acid
MPRSFSCQKPXDSNRRPNYSELQTLSKFTFQQPYDQAHLLAAIPPPEILNPTASLPTLIWDSVLAPQAQPTAWASLRAQESPRAAELTSLSDEDSGKGSQPPSPPSPASSSFSSTSASSLEAEAYAVFPGLVQVPKQLAQLSEAKDLQSRKAFNCKYCNKEYLSLGALKMHIRSHTLPCVCGTCGKAFSRPWLLQGHVRTHTGEKPFSCPHCSRAFADRSNLRAHLQTHSDVKKYQCQACARTFSRMSLLHKHQESGCSGCPR

SEQ ID NO: 140 - protein, 264 aa, Artificial Sequence
  Snail1 KFO35879.1
MPRSFLVRKPSDPNRKPNYSELQDSSPELTFQQPYDQAHLLAAIPPPEVLNPSASLPTLIWDSVLAPLAQPLCWASLQPQESPKAAELTSLSDEDSGKGSQPPSPPSPAPSSFSSASTSSLEAEAYAAFPGLGQLPKQLARLSAAKDLQSRKAFNCKYCNKEYLSLGALKMHIRSHTLPCVCDTCGKAFSRPWLLQGHVRTHTGEKPFSCPHCSRAFADRSNLRAHLQTHSDVKKYQCRMCSRTFSRMSLLHKHQESGCSGGPR

SEQ ID NO: 141 - protein, 264 aa, Artificial Sequence
  Snail1 XP_003467769.1
MPRSFLVRKPSDPNRKPNYSELQDSSPELTFQQPYDQAHLLAAIPPPEVLNPTASLPTLIWDSVLAPLGQPLGWASLQPQESPKAAELTSLSDEDSGKGSQPPSPPSPAPSSFSSASTSSLEAEAYAAFPGLGQLPKQLAQLSMAKDLQSRKAFNCKYCSKEYLSLGALKMHIRSHTLPCVCATCGKAFSRPWLLQGHVRTHTGEKPFSCSHCNRAFADRSNLRAHLQTHSEVKKYQCRTCARTFSRMSLLHKHQESGCLGRPR

SEQ ID NO: 142 - protein, 264 aa, Artificial Sequence
  Snail1 XP_006141336.1
MPRSFLVRKSSGPRRKPNYSELQDSSLEFTFQQPYDQAHLLAAIPPPEVLNPSASLPMLIWDSLLAPQVQPVGWASLQPQEGPKAAELTSLSDEDSGKGSQPPSPPSPASSSFSSTSASSLEAEAYAAFPGLGQLPKQLAQLSMAKDSQSRKAFNCKYCNKEYLSLGALKMHIRSHTLPCVCGTCGKAFSRPWLLQGHVRTHTGEKPFSCSHCSRAFADRSNLRAHLQTHSDVKKYQCKTCARTFSRMSLLHKHEESGCSGGPR

SEQ ID NO: 143 - protein, 264 aa, Artificial Sequence
  Snail1 XP_005325275.1
MPRSFLVRKPSVPRRKPNYSELQDSSPEFTFQQPYDQAHLLAAIPPPEVLNPTASLPTLIWDCLLAPHTQPIGWASLQPQENPQAAELTSLSDEDSGKGSQPPSPPSPAPSSFSSTSASSLEAEAYIAFPGLGQLPKQLALLSVAKDPQSRKAFNCKYCNKEYLSLGALKMHIRSHTLPCVCATCGKAFSRPWLLQGHVRTHTGEKPFSCPHCSRAFADRSNLRAHLQTHSDVKKYQCPRCARTFSRMSLLHKHQESGCSGGPR

SEQ ID NO: 144 - protein, 510 aa, Artificial Sequence
  Snail1 ELW71708.1
MAAQHPGRDGGAQLAGAATEADPLGRFTCPVCLEVYEKPGQVPCGHGFCSACLQECLKPKKPVCGVCRSALAPGVRAAELERQIESTETSCHGCRKNFFLSKIRAHVATCSKYQNYIMEGVKATTKDASLQARNVPNRYTFPCPYCPEKNFDQEGLVEHCKLAHSMDTKSVVCPICASMPWGDPNYRSANFIEHIQRRHQFSYDTFVDYEVDEEDMMNQVLQRSIIDQWNALRPPRDPATPAGSVTMPRSFLVRKSSGPRRKPNYSELQDSSLEFTFQQPYDQAHLLAAIPPPEVLNPSASLPMLIWDSLLAPQVQPVGWASLQPQEGPKAAELTSLSDEDSGKGSQPPSPPSPASSSFSSTSASSLEAEAYAAFPGLGQLPKQLAQLSMAKDSQSRKAFNCKYCNKEYLSLGALKMHIRSHTLPCVCGTCGKAFSRPWLLQGHVRTHTGEKPFSCSHCSRAFADRSNLRAHLQTHSDVKKYQCKTCARTFSRMSLLHKHEESGCSGGPR

SEQ ID NO: 145 - protein, 237 aa, Artificial Sequence
  Snail1 EFB26680.1
EFTFQQPYDQAHLLAAIPPPEVLNPTASLPTLIWDSLLAPQAQPIGWASLLPQEVPKVVELTSLSDEDSGKGSQPPSPPSPAPSSFSSTSASSLEAEGYVAFPGLGQLPTQLAGLSVAKDSQTRKAFNCKYCNKEYLSLGALKMHIRSHTLPCVCGTCGKAFSRPWLLQGHVRTHTGEKPFSCSHCSRAFADRSNLRAHLQTHSDVKKYQCKTCSRTFSRMSLLHKHQESGCSGGPR

SEQ ID NO: 146 - protein, 242 aa, Artificial Sequence
  Snail1 XP_008696422.1
LHLPSEFTFQQPYDQAHLLAAIPPPEVLNPTASLPTLIWDSLLAPQAQPIGWASLLPQEVPKAVELTSLSDEDSGKGSQPPSPPSPAPSSFSSTSASSLEAEGYVAFPGLGQLPTQLAGLSVAKDSQTRKAFNCKYCNKEYLSLGALKMHIRSHTLPCVCGTCGKAFSRPWLLQGHVRTHTGEKPFSCSHCSRAFADRSNLRAHLQTHSDVKKYQCKTCSRTFSRMSLLHKHQESGCSGGPR

SEQ ID NO: 147 - protein, 264 aa, Artificial Sequence
  Snail1 NP_446257.1
MPRSFLVRKPSDPRRKPNYSELQDACVEFTFQQPYDQAHLLAAIPPPEVLNPAASLPTLIWDSLLVPQVQPVAWATLPLRESPRAAELTSLSDEDSGKSSQPPSPPSPAPSSFSSTSASSLEAEAFIAFPGLGQLPKQLARLSVAKDPQSRKAFNCKYCNKEYLSLGALKMHIRSHTLPCVCTTCGKAFSRPWLLQGHVRTHTGEKPFSCSHCNRAFADRSNLRAHLQTHSDVKRYQCQACARTFSRMSLLHKHQESGCSGGPR

SEQ ID NO: 148 - protein, 264 aa, Artificial Sequence
  Snail1 XP_005392380.1
MPRSFLVRKPSDPRRKPNYSELQDSSPEFTFQQPYDQAHLLAAIPPPEVLNPTASLPTLIWDSVLAPLTQPLGRAPVQPQESPRAAELTSLSDEDSGKGSQPPSPPSPAPSSFSSASTSSLEAEACAALPGLGQLPKQLTGLSMAKDLQCRKAFNCKYCNKEYLSLGALKMHIRSHTLPCVCTTCGKAFSRPWLLQGHVRTHTGEKPFSCPHCSRAFADRSNLRAHLQTHSDVKKYQCKTCSRTFSRMSLLHKHQESGCSGGPR

SEQ ID NO: 149 - protein, 264 aa, Artificial Sequence
  Snail1 XP_008833387.1
MPRSFLVRKPSDPRRKPNYSELQDACLEFTFQQPYDQVHLLAAIPPPEVLNPAASLPTLIWDSLLVPQVQPVAWASLPPRESPKATELTSLSDEDSGKGSQPPSPPSPAPSSFSSTSASSLEAEAFVAFSGLGQLPKQLARLSVAKDPQSRKAFNCKYCNKEYLSLGALKMHIRSHTLPCVCGTCGKAFSRPWLLQGHVRTHTGEKPFSCSHCSRAFADRSNLRAHLQTHSDVKKYQCQACARTFSRMSLLHKHQESGCSGGPR

SEQ ID NO: 150 - protein, 264 aa, Artificial Sequence
  Snail1 XP_005362911.1
MPRSFLVRKPSDPRRKPNYSELQDACVEFTFQQPYDQAHLLAAIPPPEVLNPAASLPTLIWDSLLVPQVQPVAWATLPPRESPRAAELTSLSDEDSGKSSQPPSPPSPAPSSFSSTSASSLEAEAFIAFPGLGQLPKQLARLSVAKDPQSRKAFNCKYCNKEYLSLGALKMHIRSHTLPCVCATCGKAFSRPWLLQGHVRTHTGEKPFSCSHCNRAFADRSNLRAHLQTHSDVKKYQCQACARTFSRMSLLHKHQESGCSGGPR

SEQ ID NO: 151 - protein, 264 aa, Artificial Sequence
  Snail1 XP_006992689.1
MPRSFLVRKPSDPRRKPNYSELQDACVEFTFQQPYDQAHLLAAIPPPEVLNPAASLPTLIWDSLLVPQVQPVAWATLPPRESPRAAELTSLSDEDSGKSSQPPSPPSPAPSSFSSTSASSLEAEAFIAFSGLGQLPKQLARLSVAKDPQSRKAFNCKYCNKEYLSLGALKMHIRSHTLPCVCATCGKAFSRPWLLQGHVRTHTGEKPFSCSHCNRAFADRSNLRAHLQTHSDVKKYQCQACARTFSRMSLLHKHQESGCSGGPR

SEQ ID NO: 152 - protein, 272 aa, Artificial Sequence
  Snail1 XP_005688790.1
MWRNRKKAVDLCAGGGAERLKISAAEVSELRDSSPELTFQQPYDQAHLLAAIPPPEVLNPTASLPTLIWDSLLAPQAQPISWASLLPQEIPKAGELTSLSDEDSGKGSQPPSPPSPAPSSFSSTSASSLEAEGYAAFPGLGQLPKQLTGLSVAKDPQSRKAFNCKYCNKEYVSLGALKMHIRSHTLPCVCSTCGKAFSRPWLLQGHVRTHTGEKPFSCPHCSRAFADRSNLRAHLQTHSDVKKYQCKTCSRTFSRMSLLHKHQESGCSGGPR

SEQ ID NO: 153 - protein, 238 aa, Artificial Sequence
  Snail1 XP_005635224.1
SEFTFQQPYDQAHLLAAIPPPEVLNPTASLPTLIWDSLLAPQAQPMSWAALLPQEVPKAVELTSLSDEDSGKGSQPPSPPSPAPSSFSSTSASSLEAEGYVAFPGLGQLPTQLAGLSVAKDSQTRKAFNCKYCNKEYLSLGALKMHIRSHTLPCVCGTCGKAFSRPWLLQGHVRTHTGEKPFSCSHCSRAFADRSNLRAHLQTHSDVKKYQCKTCSRTFSRMSLLHKHQESGCSGGPR

SEQ ID NO: 154 - protein, 244 aa, Artificial Sequence
  Snail1 XP_008532217.1
FLCLPSEFTFQQPYDQAHLLAAIPPPEVLNPTASLPTLIWDSLLAPQAQAIGWASLLPQEMPKAVVELTSLSDEDSGKGSQPPSPPSPTPSSFSSTSASSLEAEGFAAFPGLGQLPKQLAGLSVAKDPQSRKAFNCKYCNKEYVSLGALKMHIRSHTLPCVCGTCGKAFSRPWLLQGHVRTHTGEKPFSCSHCSRAFADRSNLRAHLQTHSDVKKYHCKACARTFSRMSLLHKHQEAGCSGGPR

SEQ ID NO: 155 - protein, 264 aa, Artificial Sequence
  Snail1 XP_002913027.1
MPRSFLVRKSACSRRRPNYSELHDSSPEFTFQQPYDQAHLLAAIPPPEVLNPTASLPTLIWDSLLAPQAQPIGWASLLPQEVPKVVELTSLSDEDSGKGSQPPSPPSPAPSSFSSTSASSLEAEGYVAFPGLGQLPTQLAGLSVAKDSQTRKAFNCKYCNKEYLSLGALKMHIRSHTLPCVCGTCGKAFSRPWLLQGHVRTHTGEKPFSCSHCSRAFADRSNLRAHLQTHSDVKKYQCKTCSRTFSRMSLLHKHQESGCSGGPR

SEQ ID NO: 156 - protein, 264 aa, Artificial Sequence
  Snail1 XP_004687529.1
MPRSFLVRKSAASRRRPNYSELHDSSPEFTFQQPYDQAHLLAAIPPPEVLNPTASLPTLIWDSLLAPQAQPIGWASLLPQEIPKAVELTSLSDEDSGKGSQPPSPPSPTPSSFSSTSASSLEAEGYAAFPGLGQLPKQLAGLSVVKDPQSRKAFNCKYCNKEYISLGALKMHIRSHTLPCVCDTCGKAFSRPWLLQGHVRTHTGEKPFSCSHCSRAFADRSNLRAHLQTHSDVKKYQCQACSRTFSRMSLLHKHQESGCSGGPR

SEQ ID NO: 157 - protein, 264 aa, Artificial Sequence
  Snail1 XP_004412574.1
MPRSFLVRKSACSRRRPNYSELHDSSPEFTFQQPYDQAHLLAAIPPPEVLNPTASLPTLIWDSLLAPQAQPIGWASLLPQEVPKAVELTSLSDEDSGKGSQPPSPPSPAPSSFSSTSASSLEAEGYAAFPGLGQLPTQLAGLSVAKDSQTRKAFNCKYCNKEYLSLGALKMHIRSHTLPCVCGTCGKAFSRPWLLQGHVRTHTGEKPFSCSHCSRAFADRSNLRAHLQTHSDVKKYQCKTCSRTFSRMSLLHKHQESGCSGGPR

SEQ ID NO: 158 - protein, 264 aa, Artificial Sequence
  Snail1 XP_007185370.1
MPRSFLVRKSACSRRRPNYSELHDSSPEFTFQQPYDQAHLLAAIPPPEVLNPTASLPTLIWDSLLAPQAQPIGWASLLPQEVPKAVELTSLSDEDSGKGSQPPSPPSPAPSSFSSTSASSLEAEGYAAFPGLGQLPKQLAGLSVAKDPQSRKAFNCKYCNKEYISLGALKMHIRSHTLPCVCSTCGKAFSRPWLLQGHVRTHTGEKPFSCPHCSRAFADRSNLRAHLQTHSDVKKYQCKTCSRTFSRMSLLHKHQESGCSGGPR

SEQ ID NO: 159 - protein, 264 aa, Artificial Sequence
  Snail1 XP_007446447.1
MPRSFLVRKSACSRRRPNYSELHDSSPEFTFQQPYDQAHLLAAIPPPEVLNPTASLPTLIWDSLLAPQAQPIGWASLLPQEIPKAVELTSLSDEDSGKGSQPPSPPSPAPSSFSSTSASSLEAEGYAAFPGLGQLPKQLAGLSVAKDPQSRKAFNCKYCNKEYISLGALKMHIRSHTLPCVCSTCGKAFSRPWLLQGHVRTHTGEKPFSCPHCSRAFADRSNLRAHLQTHSDVKKYQCKTCSRTFSRMSLLHKHQESGCSGGPR

SEQ ID NO: 160 - protein, 264 aa, Artificial Sequence
  Snail1 XP_007128099.1
MPRSFLVRKSACSRRRPNYSELHDSSPEFTFQQPYDQAHLLAAIPPPEVLNPTASLPTLIWDSLLAPQAQPIGWASLLPQELPKAVELTSLSDEDSGKGSQPPSPPSPAPSSFSSTSASSLEAEGYAAFPGLGQLPKQLAGLSVAKDPQSRKAFNCKYCNKEYISLGALKMHIRSHTLPCVCSTCGKAFSRPWLLQGHVRTHTGEKPFSCPHCSRAFADRSNLRAHLQTHSDVKKYQCKTCSRTFSRMSLLHKHQESGCSGGPR

SEQ ID NO: 161 - protein, 264 aa, Artificial Sequence
  Snail1 XP_004282941.1
MPRSFLVRKSACSRRRPNYSELHDSSPEFTFQQPYDQAHLLAAIPPPEVLNPTASLPTLIWDSLLAPQAQPIGWASLLPQEIPKAIELTSLSDEDSGKGSQPPSPPSPAPSSFSSTSASSLEAEGYAAFPGLGQLPKQLAGLSVAKDPQSRKAFNCKYCNKEYISLGALKMHIRSHTLPCVCSTCGKAFSRPWLLQGHVRTHTGEKPFSCPHCSRAFADRSNLRAHLQTHSDVKKYQCKTCSRTFSRMSLLHKHQESGCSGGPR

SEQ ID NO: 162 - protein, 264 aa, Artificial Sequence
  Snail1 NP_035557.1
MPRSFLVRKPSDPRRKPNYSELQDACVEFTFQQPYDQAHLLAAIPPPEVLNPAASLPTLIWDSLLVPQVRPVAWATLPLRESPKAVELTSLSDEDSGKSSQPPSPPSPAPSSFSSTSASSLEAEAFIAFPGLGQLPKQLARLSVAKDPQSRKIFNCKYCNKEYLSLGALKMHIRSHTLPCVCTTCGKAFSRPWLLQGHVRTHTGEKPFSCSHCNRAFADRSNLRAHLQTHSDVKRYQCQACARTFSRMSLLHKHQESGCSGGPR

SEQ ID NO: 163 - protein, 264 aa, Artificial Sequence
  Snail1 XP_004746271.1
MPRSFLVRKSACSRRRPNYSELHDSSPEFTFQQPYDQAHLLAAIPPPEVLNPTASLPTLIWDSLLAPQAQPIGWASLLPQEVPKAVELTSLSDEDSGKGSQPPSPPSPAPSSFSSTSASSLEAEGYVAFPGLGQLPTQLAGLSVAKDSQTRKAFNCKYCNKEYLSLGALKMHIRSHTLPCVCGTCGKAFSRPWLLQGHVRTHTGEKPFSCSHCSRAFADRSNLRAHLQTHSDVKKYQCKTCSRTFSRMSLLHKHQESGCSGGPR

SEQ ID NO: 164 - protein, 264 aa, Artificial Sequence
  Snail1 XP_006206723.1
MPRSFLVRKSACSRRRPNYSELHDSSPEFTFQQPYDQAHLLAAIPPPEVLNPTASLPTLIWDSLLAPQAQPIGWASLLSQEIPKAVELTSLSDEDSGKGSQPPSPPSPAPSSFSSTSASSLEAEGYTAFPGLGQLPKQLTGLSVAKDPQSRKAFNCKYCNKEYISLGALKMHIRSHTLPCVCGTCGKAFSRPWLLQGHVRTHTGEKPFSCSHCSRAFADRSNLRAHLQTHSDVKKYQCKTCSRTFSRMSLLHKHQESGCSGGPR

SEQ ID NO: 165 - protein, 264 aa, Artificial Sequence
  Snail1 XP_006175044.1
MPRSFLVRKSACSRRRPNYSELHDSSPEFTFQQPYDQAHLLAAIPPPEVLNPTASLPTLIWDSLLAPQAQPIGWASLLSQEIPKAVELTSLSDEDSGKGSQPPSPPSPAPSSFSSTSASSLEAEGYIAFPGLGQLPKQLTGLSVAKDPQSRKAFNCKYCNKEYISLGALKMHIRSHTLPCVCGTCGKAFSRPWLLQGHVRTHTGEKPFSCSHCSRAFADRSNLRAHLQTHSDVKKYQCKTCSRTFSRMSLLHKHQESGCSGGPR

SEQ ID NO: 166 - protein, 264 aa, Artificial Sequence
  Snail1 NP_001106179.1
MPRSFLVRKSAGSRRRPNYSELHDSSPELTFQQPYDQAHLLAAIPPPEVLNPTASLPTLIWDSLLAPQAQPISWASLLPQEIPKAGELTSLSDEDSGKGSQPPSPPSPAPSSFSSTSASSLEAEGYAAFPGLGQLPKQLTGLSVAKDPQSRKAFNCKYCNKEYISLGALKMHIRSHTLPCVCSTCGKAFSRPWLLQGHVRTHTGEKPFSCPHCSRAFADRSNLRAHLQTHSDVKKYQCKTCSRTFSRMSLLHKHQESGCSGGPR

SEQ ID NO: 167 - protein, 264 aa, Artificial Sequence
  Snail1 XP_004430338.1
MPRSFLVRKSACSRRRPNYSELHDSSPEFTFQQPYDQAHLLAAIPPPEVLNPTASLPTLIWDSLLAPQAQPIGWASLLPQEIPKAVELTSLSDEDSGKGSQPPSPPSPTPSSFSSTSASSLEAEGYAAFPGLGQLPKQLAGLSVAKDPQSRKAFNCKYCSKEYVSLGALKMHIRSHTLPCVCGTCGKAFSRPWLLQGHVRTHTGEKPFSCSHCSRAFADRSNLRAHLQTHSDVKKYQCSACSRTFSRMSLLHKHQESGCAGGPR

SEQ ID NO: 168 - protein, 264 aa, Artificial Sequence
  Snail1 XP_005074485.1
MPRSFLVRKPTDPRRKPNYSELQDACVDFVFQQPYDQAHLLAAIPPPEVLNPAASLPTLIWDSLLVPQVQPVAWATLPPRESPRAAELTSLSDEDSGKSSQPPSPPSPAPSSFSSTSASSLEAEAFIAFPGLGQLPKQLARLSVAKDPQSRKAFNCKYCNKEYLSLGALKMHIRSHTLPCVCTTCGKAFSRPWLLQGHVRTHTGEKPFSCSHCSRAFADRSNLRAHLQTHSDVKKYHCQACARTFSRMSLLHKHQESGCSGGPR

SEQ ID NO: 169 - protein, 242 aa, Artificial Sequence
  Snail1 XP_007608553.1
PPLPAEFIFQQPYDQAHLLAAIPPPEVLNPAASLPTLIWDSLLVPQVQPVAWATLPPRESPRAAELTSLSDEDSGKSSQPPSPPSPAPSSFSSTSASSLDSEAFVSFPGLGQLPKQLARLSVAKDPQSRKAFNCKYCNKEYLSLGALKMHIRSHTLPCVCATCGKAFSRPWLLQGHVRTHTGEKPFSCSHCNRAFADRSNLRAHLQTHSDVKKYQCQACARTFSRMSLLHKHQESGCSGGPR

SEQ ID NO: 170 - protein, 264 aa, Artificial Sequence
  Snail1 XP_005983433.1
MPRSFLVRKSAGSRRRPNYSELHDSSPELTFQQPYDQAHLLAAIPPPEVLNPTASLPTLIWDSLLAPQAQPISWASLLPQEIPKAGELTSLSDEDSGKGSQPPSPPSPAPSSFSSTSASSLEAEGYAAFPGLGQLPKQLTGLSVAKDPQSRKAFNCKYCSKEYISLGALKMHIRSHTLPCVCSTCGKAFSRPWLLQGHVRTHTGEKPFSCPHCSRAFADRSNLRAHLQTHSDVKKYQCKTCSRTFSRMSLLHKHQESGCSGGPR

SEQ ID NO: 171 - protein, 264 aa, Artificial Sequence
  Snail1 CAA47675.1
MPRSFLVRKPSDPRRKPNYSELQDACVEFTFQQPYDQAHLLAAIPPPEVLNPAASLPTLIWDSLLVPQVRPVAWATLPLRESPKAVELTSLSDEDSGKSSQPPSPPSPAPSSFSSTSASSLEAEAFIAFPGLGQLPKQLARLSVAKDPQSRKIFNCKYCNKEYLSLGALKMHIRSHTLPCVCTTCGKAFSRPWLLQGHVRTHTGEKPFSCSHCNRAFAVRSNLRAHLQTHSDVKRYQCQACARTFSRMSLLHKHQESGCSGGPR

SEQ ID NO: 172 - protein, 264 aa, Artificial Sequence
  Snail1 XP_003983440.1
MPRSFLVRKSACSRRRPNYSELHDSSPEFTFQQPYDQAHLLAAIPPPEVLNPTASLPTLIWDSLLAPQAQPIGWAALLPQEVPKAAELTSLSDDDSGKGSQPPSPPSPAPSSFSSTSASSLEAEGYVAFPGLGRLPAQLAGLSVAKDSQTRKAFSCKYCNKEYLSLGALKMHIRSHTLPCVCGTCGKAFSRPWLLQGHVRTHTGEKPFSCSHCSRAFADRSNLRAHLQTHSDVKKYQCKTCSRTFSRMSLLHKHQESGCSGGPR

SEQ ID NO: 173 - protein, 265 aa, Artificial Sequence
  Snail1 XP_001501267.2
MPRSFLVRKSACSRRRPNYSELHDSSPEFTFQQPYDQAHLLAAIPPPEVLNPTASLPTLIWDSLLAPQAQAIGWASLLPQEMPKAVVELTSLSDEDSGKGSQPPSPPSPTPSSFSSTSASSLEAEGFAAFPGLGQLPKQLAGLSVAKDPQSRKAFNCKYCNKEYVSLGALKMHIRSHTLPCVCGTCGKAFSRPWLLQGHVRTHTGEKPFSCSHCSRAFADRSNLRAHLQTHSDVKKYHCKACARTFSRMSLLHKHQEAGCSGGPR

SEQ ID NO: 174 - protein, 264 aa, Artificial Sequence
  Snail1XP_003502520.1
MPRSFLVRKASDPRRKPNYSELQDACVEFIFQQPYDQAHLLAAIPPPEVLNPAASLPTLIWDSLLVPQVQPVAWATLPPRESPRAAELTSLSDEDSGKSSQPPSPPSPAPSSFSSTSASSLDSEAFVSFPGLGQLPKQLARLSVAKDPQSRKAFNCKYCNKEYLSLGALKMHIRSHTLPCVCATCGKAFSRPWLLQGHVRTHTGEKPFSCSHCNRAFADRSNLRAHLQTHSDVKKYQCQACARTFSRMSLLHKHQESGCSGGPR

SEQ ID NO: 175 - protein, 349 aa, Artificial Sequence
  Snail1 XP_004014930.1
MHAPEARRPRGPARLPAPRGASPASPQRTCSGRGRWRRRVSIGAEVTKGRDWDGPRPPATGVLKGIGGPSPLTAQLHGVVGGELCDPGATGETPPHPTRCFGHHASLHDSSPELTFQQPYDQAHLLAAIPPPEVLNPTASLPTLIWDSLLAPQAQPISWASLLPQEIPKAGELTSLSDEDSGKGSQPPSPPSPAPSSFSSTSASSLEAEGYAAFPGLGQLPKQLTGLSVAKDPQSRKAFNCKYCNKEYVSLGALKMHIRSHTLPCVCSTCGKAFSRPWLLQGHVRTHTGEKPFSCPHCSRAFADRSNLRAHLQTHSDVKKYQCKTCSRTFSRMSLLHKHQESGCSGGPR

SEQ ID NO: 176 - protein, 262 aa, Artificial Sequence
  Snail1 XP_004663926.1
MPRSFLVRKPSDPRRKPNYSELQDSSLEFTFQQPYDQAHLLAAIPPPEVLNPAASLPTLIWDSLLVPHVQPVAWASFPPRESPKAAELTSLSDEDSGKGSQPPSPPSPAPSSFSSASSLEAEAFAVFPTLGQLPKQLARLSVAKDPQSRKAFNCKYCNKEYLSLGALKMHIRSHTLPCVCGTCGKAFSRPWLLQGHVRTHTGEKPFSCSHCSRAFADRSNLRAHLQTHSDVKKYQCQACARTFSRMSLLHKHQESGCSGGPR

SEQ ID NO: 177 - protein, 264 aa, Artificial Sequence
  Snail1 XP_006758858.1
MPRSFLVRKSACTRRRPNYSELHDSSPEFTFQQPYDQAHLLAAIPPPEVLNPTASLPTLIWDSLLAPQAQPVGWASLLPREIPKVVELTSLSDEDSGKGSQPPSPPSPAPSSFSSTSASSLEADGYAAFPGLGPLPKQLSGLSGAKDPQSRKAFNCKYCNKEYVSLGALKMHIRSHTLPCVCGTCGKAFSRPWLLQGHVRTHTGEKPFSCSHCSRAFADRSNLRAHLQTHSDVKKYQCKTCSRTFSRMSLLHKHEESGCSGGPR

SEQ ID NO: 178 - protein, 264 aa, Artificial Sequence
  Snail1 XP_006098041.1
MPRSFLVRKSACSRRRPNYSELHDSSPEFTFQQPYDQAHLLAAIPPPEVLNPTASLPTLIWDSLLAPQAQPVGWASLLPREIPKVVELTSLSDEDSGKGSQPPSPPSPAPSSFSSTSASSLEADGYAAFPGLGPLPKQLSGLSGAKDPQSRKAFNCKYCNKEYVSLGALKMHIRSHTLPCVCGTCGKAFSRPWLLQGHVRTHTGEKPFSCSHCNRAFADRSNLRAHLQTHSDVKKYQCKTCSRTFSRMSLLHKHEESGCSGGPR

SEQ ID NO: 179 - protein, 266 aa, Artificial Sequence
  Snail1 XP_007936620.1
MPRSFLVRKSACSRRRPNYSELHDSSLEFTFQQPYDQAHLLAAIPPPEVLNPTASLPMLIWDSLLVPQVQPSGWASLRPQEGPKATELTSLSDEDSGKGSQPPSPPSPAPSSFSSASASSLEAEAYAAFPGLGQVPKQLAVLAAAKDPQSRKAFNCKYCDKEYVSLGALKMHIRSHTLPCVCDTCGKAFSRPWLLQGHVRTHTGEKPFSCSHCNRAFADRSNLRAHLQTHSAVKKYQCKTCSRTFSRMSLLHKHEESGCSGGPRGP

SEQ ID NO: 180 - protein, 264 aa, Artificial Sequence
  Snail1 XP_004462255.1
MPRSFLVRKPACSRRRPNYSELHDSSLEFTFQQPYDQAHLLAAIPPPEVLNPTASLPTLIWDSLLAPHAQPVSWASLLPQEGPKAAELTSLSDEDSGKGSQPPSPPSPAPSSFSSASASSLEAETYAAFPGLGQPPKQLAVLAVARDPQSRKAFNCKYCDKEYVSLGALKMHIRSHTLPCVCDTCGKAFSRPWLLQGHVRTHTGEKPFSCSHCSRAFADRSNLRAHLQTHSDVKKYQCKTCARTFSRMSLLHKHEESGCAGGPR

SEQ ID NO: 181 - protein, 264 aa, Artificial Sequence
  Snail1 XP_008139391.1
MPRSFLVRKSACSRRRPNYSELHDSSPEFTFQQPYDQAHLLAAIPPPEVLNPTASLPTLIWDSLLAPQAQPLGWPSLLPREIPKVVELTSLSDEDSGKGSQPPSPPSPAPSSFSSTSASSLEAEGYAAFPSLGPLPKQLSGLSGAKDPQSRKAFNCKYCNKEYVSLGALKMHIRSHTLPCVCGTCGKAFSRPWLLQGHVRTHTGEKPFSCSHCSRAFADRSNLRAHLQTHSDVKKYQCKTCSRTFSRMSLLHKHQESGCSGGPR

SEQ ID NO: 182 - protein, 274 aa, Artificial Sequence
  Snail1 XP_004636165.1
MPRSFLVRKPTDPNRKPNYSELQDSSPELTFQQPYDQAHLLAAIPPPEVLNPTASLPTLIWDSVLVPLTQPLRPASLQPLHPASLQPQESPSPKAAELTSLSDEDSGKGSQPPSPPSPAPSSFSSASTSSLEAEACAAFPGLGQLPKQLAGLSMAKDLQCRKAFNCKYCNKEYLSLGALKMHIRSHTLPCVCATCGKAFSRPWLLQGHVRTHTGEKPFSCSHCSRAFADRSNLRAHLQTHSDVKKYRCKTCSRTFSRMSLLHKHQESGCSGGPH

SEQ ID NO: 183 - protein, 266 aa, Artificial Sequence
  Snail1 XP_006921969.1
MPRSFLVRKSACSRRRPNYSELHDSSPEFTFQQPYDQAHLLAAIPPPEVLNPTASLPTLIWDSLLAPQAQPVGRASLLAQEIPKAVELTSLSDEDSGKGSQPPSPPSPAPSSFSSTSASSLEAEGYAAFSGLGPLPGLKQLAGLSGAKDPQSRKAFNCKYCNKEYISLGALKMHIRSHTLPCVCSTCGKAFSRPWLLQGHVRTHTGEKPFSCPHCSRAFADRSNLRAHLQTHSDVKKYQCKTCSRTFSRMSLLHKHQESGCSGGPR

SEQ ID NO: 184 - protein, 339 aa, Artificial Sequence
  Snail1 XP_004370603.1
MPRSFLVRKPACSRRRPNYSELHDSSLEFTFQQPYDQAHLLAAIPPPEVLNPTASLPTLIWDSLLVPQVQPSGWASLRPQECPKAAELTSLSDEDSGKGSQPPSPPSPASSSFSSGSASSLEAEAYAAFPGLSQVPKQLAVLAVAKDPQSRKAFNCKYCDKEYVSLGALKMHIRSHTLPCVCDTCGKAFSRPWLLQGHVRTHTGEKPFSCSHCSRAFADRSNLRAHLQTHSAVKKYQCKTCSRTFSRMSLLHKHEESGCSGGPRGPRAPLQAAGPLPAGPQRDECSTRRPLWGPQTARRQANPAWKIRRWKARRLNEGAASSGGGSEGAEGAAGAWPET

SEQ ID NO: 185 - protein, 264 aa, Artificial Sequence
  Snail1 XP_004618816.1
MPRSFLVRKSSCPRRRPNYSELHDSCPELTFQQPYDQAHLLAAIPPPEVLNPTASLPTLIWDSLLAPRAPPPSWAALLPSDLPQAAELTSLSDEDSGKGSQPPSPPSPAPSSFSSTSASSLEAEGYAAFPGLGPLPKQLSGLALAKDPQARKAFNCKYCTKEYVSLGALKMHIRSHTLPCVCDTCGKAFSRPWLLQGHVRTHTGEKPFSCTHCSRAFADRSNLRAHLQTHSDVKKYQCPACARTFSRMSLLHKHQESGCAGGPR

SEQ ID NO: 186 - protein, 224 aa, Artificial Sequence
  Snail1 XP_004325726.1
MPRSFLVRKSACSRRRPNYSELHDSSPEFTFQQPYDQAHLLAAIPPPEVLNPTASLPTLIWDSLLAPQAQPIGWASLLPQEIPKAIELTSLSDEDSGKGSQPPSPPSPAPSSFSSTSASSLEAEGYAAFPGLGQLPKQLAGLSVAKDPQSRKAFNCKYCNKEYISLGALKMHIRSHTLPCVCSTCGKAFSRPWLLQGHVRTHTGEYPCRLAALLTVPLLLLQAL

SEQ ID NO: 187 - protein, 264 aa, Artificial Sequence
  Snail1 XP_007533425.1
MPRSFLVRKSSCSRRRPNYSELHDSSPELTFQQPYDQTHLLATIPPPEVLNPTASLPTLIWDSLLAPQAQSITWASLLPQELPKAVDLTSLSDEDSGKGSQPPSPPSPAPSTFSSASFSSLEAEAYAAFPGLGQLPKQLAGLSMAKDLQARKSFNCKYCNKEYISLGALKMHIRSHTLPCVCDTCGKAFSRPWLLQGHVRTHTGEKPFSCSHCNRAFADRSNLRAHLQTHSDIKKYQCKMCSRTFSRMSLLHKHQESGCLGGPH

SEQ ID NO: 188 - protein, 266 aa, Artificial Sequence
  Snail1 XP_003419974.1
MPRSFLVRKPACSRRRPNYSELHDSSLEFTFQQPYDQAHLLAAIPPPEVLNPTASLPTLIWDSLLVPQVQPSGWASLRPQEGPKATELTSLSDEDSGKGSQPPSPPSPASSSFSSGSASSLEAEAYAPFPGLGQVPKQLAVLSVAKDPQSRKAFSCKYCDKEYVSLGALKMHIRSHTLPCVCDTCGKAFSRPWLLQGHVRTHTGEKPFSCSHCSRAFADRSNLRAHLQTHSAVKKYQCKTCSRTFSRMSLLHKHEESGCSGGPRGP

SEQ ID NO: 189 - protein, 267 aa, Artificial Sequence
  Snail1 XP_005574198.1
MPRSFLVRKPSDPDRKPNYSELPDSNPEFTFQQPYHRAHLLAAMPRSEILNPSASPPTLIWDAFLALQAQPTARASLQLGLSQESPKVAELTSLSDEDSGKGSQSPSPPSQAPSSFSSTSASSLEAEADATSPGLGQVPKQLAQVSEAKDSQFQKAFNCQYCNKECLSLGVLKRHIRSHTLPFVCGTCGKAFSRPWLLRGHVRTHTGEKPFSCPHCSRAFADRSNLRAHLQTHLDIKKYQCQACTRTFSRMALLHKHQESGCSGGPC

SEQ ID NO: 190 - protein, 206 aa, Artificial Sequence
  Snail1 AAQ21376.1
MPRSVLVKKPACSRRRPNYSELHDSSPEFTFQQPYDQAHLLAAIPPPEVLNPTASLPTLIWDSLLAPQAQPIGWASLLPQEIPRAVELTSLSDEDSGKGSQPPSPPSPAPSSFSSTSASSPEAESYAAFPGLGQLPKQLAGLSVAKDPQSRKAFNCKYCNKEYVSLGALKMHIRSHTLPCVCGTCGKAFFRPWLVEGHVRTHTGEK

SEQ ID NO: 191 - protein, 263 aa, Artificial Sequence
  Snail1 XP_007641286.1
MPRSFLVRKASDPRRKPNYSELQDACVEFIFQQPYDQAHLLAAIPPPEVLNPAASLPTLIWDSLLVPQVQPVAWATLPPRESPRAAELTSLSDEDSGKSSQPPSPPSPAPSSFSSTSASSLDSEAFVSFPGLGQLPKQLARLSVAKDPQSRKAFNCKYCNKEYLSLGALKMHIRSHTLPCVCATCGKAFSRPWLLQGHVRTHTGLQKGQMANNQKCSVPARRTGLTVDRTLGGSLETQKSDGQGYTQEIQRPETPHPVQACAQ

SEQ ID NO: 192 - protein, 264 aa, Artificial Sequence
  Snail1 XP_005866258.1
MPRSFLVRKSACSRLRPNYSELHDSSPEFTFQQPYDQAHLLAAIPPPEVLNTTASLPTLIWDSLLAPQAQPVGWASLLPREIPKVVELTSLSDEDSGKGSQPPSPPSPAPSSFSSTSASSLEADGYAAFPGLGPLPKQLSGLSGAKDPRSRKAFNCKYCNKEYVRLGALKMHIRSHTLPCVCGTCGKAFSRPWLLQGHVRTHTGEKPFSCSHCNRAFADRSNLRAHLQTHSDVKKYQCKTCSRTFSRMSLLHKHEESGCSGGPR

SEQ ID NO: 193 - protein, 266 aa, Artificial Sequence
  Snail1 XP_006839389.1
MPRSFLVRKPACSRRRPNYSELHDSSLEFTFEQPYDQAHLLAAIPPPEVLNPKASLPTLIWDSLLVPQVQPSIWASLQTQEGPKASELTSLSDEDSGKGSQPPSPPSPAPSSFSSASASSLEAEAYAAFPGLGPVPKQLAVLAGAKDPQSRKAFNCKYCDKEYVSLGALKMHIRSHTLPCVCDTCGKAFSRPWLLQGHVRTHTGEKPFSCSHCSRAFADRSNLRAHLQTHSAVKKYQCKTCSRTFSRMSLLHKHEESGCSGGPRGP

SEQ ID NO: 194 - protein, 266 aa, Artificial Sequence
  Snail1 XP_004698375.1
MPRSFLVRKPACSRRRPNYSELHDSSLEFAIQQPYDQAHLLAAIPPPEVLNPRASLPTLIWDSLLVPQVQPSGWASLPPQEGPKASELTSLSDEDSGKGSQPPSPPSPAPSSFSSASASSLEAEAFAAFTGLGQVPKQLAVLTVAKDPQSRKAFNCKYCDKEYVSLGALKMHIRSHTLPCVCDICGKAFSRPWLLQGHVRTHTGEKPFSCPHCSRAFADRSNLRAHLQTHSAVKKYQCRTCSRTFSRMSLLHKHEESGCSGGPRGP

SEQ ID NO: 195 - protein, 267 aa, Artificial Sequence
  Snail1 XP_006881815.1
MPRSFLVRKPACSRRRPNYSELHDSSPEFTFQQPYDQAHLLAAIPPPEVLNPRASLPTLIWDSLLLPQLQPSAWASLRPQEGPKAAELTFLSDEDSGKGSQPPSPPSPAPSSFSSASASSLEAEAFTAFPGLGPVPKPPLAVLAGTKDPQARKAFNCKYCDKEYVSLGALKMHIRSHTLPCVCDTCGKAFSRPWLLQGHVRTHTGEKPFSCSHCNRAFADRSNLRAHLQTHSAVKKYQCKSCSRTFSRMSLLHKHEESGCSGGPRGP

SEQ ID NO: 196 - protein, 267 aa, Artificial Sequence
  Snail1 EHH21632.1
MPRSFLVRKPSDPDRKPNYSELPDSNPEFTFQQPYHRAHLLAAMPRSEILNPSASPPTLIWDAFLALQAQPTARASLQLGLSQESSKVAELTSLSDEDSGKGSQSPSPPSQAPSSFSSTSASSLEAEADATSPGLGQVPKQLAQVSEAKDSQFQKAFNCQYCNKECLSLGVLKRHIRSHTLPFVCGTCGKAFSRPWLLRGHVRTHTGEKPFSCPHCSRAFADRSNLRAHLQTHLDIKKYQCQACTRTFSRMALLHKHQESGCSGGPC

SEQ ID NO: 197 - protein, 263 aa, Artificial Sequence
  Snail1 XP_005860983.1
MPRSFLVRKSACSRLRPNYSELHDSSPEFTFQQPYDQAHLLAAIPPPEVLNPTASLPTLIWDSLLAPQAQPIGWASLLPREIPKVVELTSLSDEDSGKGSQPPSPPSPALSSSSTLASSLEADGYAAFPGLGPLPKQRSGLSGAKDPRSRKAFNCKYCNKEYVRLGALKMHIRSHTLPCVCGTCGKAFSRPWLLQGHVRTHTGEKPFSCSHCNHAFANRSNLRAHLQTHSDVKKYQCKTCSRTFSRMSLLHKHQESGCSGGPR

SEQ ID NO: 198 - protein, 249 aa, Artificial Sequence
  Snail1 XP_005658936.1
  misc_feature (144)..(152): Xaa is any amino acid
MPRSFLVRKPACSRRRPNYSELHDSSPEFTFQQPYDQAHLLAAIPPPEVLNPTASLPTLIWDSLLAPQAQPIGWASLLPQEIPRAVELTSLSDEDSGKGSQPPSPPSPAPSSFSSTSASSLEAESYAAFPGLGQLPKQLAGLSXXXXXXXXXAFNCKYCNKEYVSLGALKMHIRSHTLPCVCGTCGKAFSRPWLLQGHVRTHTGEKPFSCSHCTHSDVKKYQCKTCSRTFSRMSLLHKHQESGCSGGPR

SEQ ID NO: 199 - protein, 292 aa, Artificial Sequence
  Snail1 XP_006099783.1
MPRCFLVRKSACSRRRRPNYSELHDSSPEFTFQQPYDPAHLLAAIPPPEVLNPTASLPTLIWDSLLAPQAQPVGWASLLPREIPEVVELTSLSDEDSGKGSQPPSPPSPVPCSSSTSASFLEAEGHAAFLGLGPLPKQLSGLSGAKGPQSHKAFNCKYCNTEYGSLGALKMHIRSHTLPWVCGTCGKAFSRSWLLQGHVRTHTGEKPFSCSHCNYAFADRSNLRAHLRTHSDVKKYQCKTCSRTFSRLSRLHKHQESGCSGGPPADPQGCFCLSRPSPCSSLPQLWKEGPLE

SEQ ID NO: 200 - protein, 258 aa, Artificial Sequence [sequence omitted]

SEQ ID NO: 201 - protein, 261 aa, Artificial Sequence
  Snail1 XP_004585952.1
MPRSFLVRKQSVPRRKPNYSELQDSSLEFTFQQPYDQAHLLATIPPPEVLKPTASLPTLIWDSLLVPPVPRGPVVAWAALQVAELTVLSDEDSGQGSQPPSPPSPAPSSFSSASLSSLEAEVCTTCPALGPLPRPPSQLCETKEPQARKAFTCKYCDKEYLSLGALKMHIRSHTLPCVCATCGKAFSRPWLLQGHVRTHTGEKPFSCSHCSRAFADRSNLRAHLQTHSDVKKYQCVVCARTFSRMSLLHKHQESGCMAGPR

SEQ ID NO: 202 - protein, 3573 aa, Artificial Sequence
  Snail1 XP_004033198.1
  misc_feature (366)..(370): Xaa is any amino acid
MTHKPCSILSFYYDCTRNAFLRPKLGKQYEASCVSFERVLVENKLHGLSPALSEAIQSISRWELVQAALPHVLHCTATLLSNRNKLGHQDKLGVAETKLLHTLHWMLLEAPQDCNNERFGGTDRGSSWGGSSSAFIHQVENQGSPGQPCQSSSNDEEENNRRKIFQNSMATVELFVFLFAPLVHRIKESDLTFRLASGLVIWQPMWEHRQPEVSGFTALVKPIRNIITAKRSSPINSQSRTCESLNQDARHLERAGVEIRPYTTSILSRWLVSTSLPLRYSATSLPLRYSATSLPLRYSATSLPLRYSATSLPLRYSATSLPLRYSATSLPLRYSATSLPLRYSATSLPLRYSATSLPLRYSATSXXXXXLSDLVASTTMPRSFLVRKLPDPDRKPNYSKLPDSNPEFTFQQPYHQDHLNSTALLPTLIWDAFLALQAQPTARASLQLRLPQESSKAAELTSLSDEDSGKGSQSPSPRSQPSSSFSSTSASSLEAEADTTFPGLGQVCKQLAQVSEAKDSQFQKAFNCQYCNKECLSLGALKKHIRSHTLPFACETCGKAFSRPWLLRGHVRTHTGEKPFSCPHCSRAFADRSNLRAHLQTHLDVKKYQCQACARTFSRMALLHKHQEASLVIPPCQRSRYATYFDVAVLRCLLQPHWSEEGTQWSLMYYLQRLRHMLEEKPEKPPEPDIPLLPRPRSSSMVAAAPSLVNTHKTQDLTMKCNEEEKSLSSEAFSKVSLTNLRRSAVPDLSSDLGMNIFKKFKSRKEDRERKGSIPFHHTGKRRPRRMGVPFLLHEDHLDVSPTRSTFSFGSFSGLGEDRRGIEKGGWQTTILGKLTRRGSSDAATEMESLSARHSHSHHTLVSDLPDPSNSHGENTVKEVRSQISTITVATFNTTLASFNVGYADFFNEHMRKLCNQVPIPEMPHEPLACANLPRSLTDSCINYSYLEDTEHIDGTNNFVHKNGMLDLSVVLKAVYLVLNHDISSRICDVALNIVECLLQLGVVPCVEKNRKKSENKENETLEKRPSEGAFQFKGVSGSSTCGFGGPAVSGAGDGGGEEGGGGDGGGGGGDGGGGGGGGGGPYEKNDKNQEKDESTPVSNHRLALTMLIKIVKSLGCAYGCGEGHRGLSGDRLRHQVFRENAQNCLTKLYKLDKMQFRQTMRDYVNKDSLNNVVDFLHALLGFCMEPVTDNKAGFGNNFTTVDNKSTAQNVEGIIVSAMFKSLITRCASTTHELHSPENLGLYCDIRQLVQFIKEAHGNVFRRVALSALLDSAEKLAPGKKVEENEQESKPAVSKRSEAGSIVDKGQVSSAPEECRSFMSGRPSQTPEHDEQMQGANLGRKDFWRKMFKSQSAASDTSSQSEQDTSECTTAHSGTTSDRRSRSRSRRISLRKKLKLPIGKRNWLKRSSLSGLADGVEDLLDISSVDRLSFIRQSSKVKFTSAVKLSEGGPGSGMENGRDEEENFFKRLGCHSFDDHLSPNQDGGKSKNVVNLGAIRQGMKRFQFLLNCCEPGTIPDASILAAALDLEAPVVARAALFLECARFVHRCNRGNWPEWMKGHHVNITKKGLSRGRSPVVGNKRNQKLQWNAAKLFYQWGDAIGVRLNELCHGESESPANLLGLIYDEETKRRLRKEDEEEDFLDDSTVNPSKCGCPFALKMAACQLLLEITTFLRETFSCLPRPRTEPLVDLESCRLRLDPELDRHRYERKISFAGVLDENEDSKDSLHSSSHTLKSDAGVEEKKEGSPWSASEPSIEPEGMSNAGAEENYHRNMSWLHVMILLCNQQSFICTHVDYCHPHCYLHHSRSCARLVRAIKLLYGDSVDSLRESSNISSVALRGKKQKECSDKSCLRTPSLKKRVSDANLEGKKDSGMLKYIRLQVMSLSPAPLSLLIKAAPILTEEMYGDIQPAAWELLLSMDEHMAGAAAAMFLLCAVKVPEAVSDMLMSEFHHPETVQRLNAVLKFHTLWRFRYQVWPRMEEGAQQIFKIPPPSINFTLPSPVLGMPSVPMFDPPWVPQCSGSVQDPINEDQSKSFSARAVSRSHQRAEHILKNLQQEEEKKRLGREASLITAIPITQEACYEPTCTPNSEPEEEVEEVTNLASRRLSVSPSCTSSTSHRNYSFRRGSVWSVRSAVSAEDEEHTTEHTPNHHVPQPPQAVFPACICAAVLPIVHLMEDGEVREDGVAVSAVAQQVLWNCLIEDPSTVLRHFLEKLTISNRQDELMYMLRKLLLNIGDFPAQTSHILFNYLVGLIMYFVRTPCEWGMDAISATLTFLWEVVGYVEGLFFKDLKQTMKKEQCEVKLLVTASMPGTKTLVVHGQNECDIPTQLPVHEDTQFEALLKECLEFFNIPESQSTHYFLMDKRWNLIHYNKTYVRDIYPFRRSVSPQLNLVHMHPEKGQELIQKQVFTRKLEEVGRVLFLISLTQKIPTAHKQSHVSMLQEDLLRLPSFPRSAIDAEFSLFSDPQAGKELFGLDTLQKSLWIQLLEEMFLGMPSEFPWGDEIMLFLNVFNGALILHPEDSALLRQYAATVINTAVHFNHLFSLSGYQWILPTMLQVYSDYESNPQLRQAIEFACHQFYILHRKPFVLQLFASVAPLLEFPDAANNGPSKGVSAQCLFDLLQSLEGETTDILDILELVKAEKPLKSLDFCYGNEDLTFSISEAIKLCVTVVAYAPESFRSLQMLMVLEALVPCYLQKLKRQTSQVETVPAAREEIAATAALATSLQALLYSVEVLTRPMTAPQMSRCDQGHKGTTTANHTMSSGVNTRYQEQGAKLHFIRENLHLLEEGQGLPREELDERIAREEFRRPRESLLNICTEFYKHCGPRLKILQNLAGEPRVTALELLDVKSHMRLAEIAHSLLKLAPYDTQTMESRGLRRYIMEMLPITDWTAEAVRPALILILKRLDRMFNKIHKMPTLRRQVEWEPASNLIEGVCLTLQRQPIISFLPHLRSLINVCVNLVMGVVGPSSVADGLPLLHLSPYLSPPLPFSTAVVRLVALQIQALKEDFPLSHVISPFTNQERREGMLLNLLIPFVLTVGSGSKDSPWLEQPEVQLLLQTVINVLLPPRIISTSRSKNFMLESSPAHCSTPGDAGKDLRREGLAESTSQAAYLALKVILVCFERQLGSQWYWLSLQVKEMALRKVGGLALWDFLDFIVRTRIPIFVLLRPFIQCKLLAQPAENHEELSARQHIADQLERRFIPRPLCKSSLIAEFNSELKILKEAVHSGSAYQGKTSISTVGTSTSAYRLSLATMSRSNTGTGTVWEQDSEPSQQASQDTLSRTDEEDEENDSVSMPSVVSEQEAYLLSAIGRRRFSSHVSSMSAPQAEVGMLPSQSEPNVLDDSQGLAAEGSLSRVASIQSEPGQQNLLVQQPLGRKRGLRQLRRPLLSRQKTQTEPRNRQGARLSTTRRSIQPKTKPSVDQKRSVTFIEAQPEPAAAPTDALPAAGQLQGCSPAPSRKPEARDEPVLTSSPAIVVADLHSVSPKQSENFPTEEGEKEEDTEAQGATAHSPLSTQLSDPDDFTGLETSSLLQHGDTVLHISEENGMENPLLSSQFPFTPTELGKTDAVLDESHV

SEQ ID NO: 203 - protein, 265 aa, Artificial Sequence
  Snail1 XP_004451686.1
MPRSFLVRKSACSRRRPKYSELHYSSLDFAFQAPCDQAHMLAAVAPPEVLNSTASLPTLIWDSFLASHTQTVGWASLLPPEGRKAAAADLTSLSGQDSGKGSQPLSPPSPAPSSSSASASSPEAKTHATFLSLDQPPKQLTVLTVAKDPQSPTALSCKYCDKECVSLGALKMHIRDHTLPCVCDTCGKAFSRPWLLRGHVRTHTGEKPYSCSHCSRVFADRSNMRAHLQTHLDVKKYQCKACSRTFSRMSLLRKHKELGCSGGPC
